(19) United States
(12) Patent Application Publication
(10) Pub. No.: US 2023/0287361 A1
(43) Pub. Date: Sep. 14, 2023

(54) ENGINEERED MONOAMINE OXIDASES FOR THE PREPARATION OF STEREOMERICALLY PURE FUSED BICYCLIC PROLINE COMPOUNDS

(71) Applicant: Codexis, Inc., Redwood City, CA (US)

(72) Inventors: Jessica Anna Hurtak, Mountain View, CA (US); Jonathan Vroom, South San Francisco, CA (US); David Watts, San Mateo, CA (US)

(21) Appl. No.: 18/181,760

(22) Filed: Mar. 10, 2023

Related U.S. Application Data
(60) Provisional application No. 63/319,135, filed on Mar. 11, 2022.

(51) Int. Cl. C12N 9/06; C12P 17/18

(52) U.S. Cl. CPC C12N 9/0022; C12Y 104/03004; C12P 17/18

(57) ABSTRACT

The present invention provides novel biocatalysts and associated methods of use for the oxidative desymmetrization of fused bicyclic proline analogues to produce APIs and intermediates. The novel biocatalysts of the present disclosure are engineered monoamine oxidase enzymes with improved solubility, thermostability, and activity on fused bicyclic proline compounds, as compared to a reference monoamine oxidase. In particular, the engineered monoamine oxidase enzymes of the present disclosure require reduced enzyme loading for the manufacturing of APIs and intermediates, as compared to a reference monoamine oxidase enzyme.

[0001] The present application claims priority to U.S. Prov. Pat. Appln. Ser. No. 63/319,135, filed Mar. 11, 2022, which is hereby incorporated by reference in its entirety for all purposes.

### TECHNICAL FIELD

[0002] The present disclosure relates to engineered monoamine oxidase enzymes and biocatalytic processes for the preparation of substantially stereomerically pure fused bicyclic proline compounds.

### REFERENCE TO SEQUENCE LISTING, TABLE OR COMPUTER PROGRAM

[0003] The official copy of the Sequence Listing is submitted concurrently with the specification as a XML file, with a file name of “CX2-228US1 ST26.xml”, a creation date of Mar. 8, 2023, and a size of 2.32 megabytes. The Sequence Listing filed is part of the specification and is incorporated in its entirety by reference herein.

### BACKGROUND

[0004] Bicyclic proline analogues are used in the discovery and development of peptidomimetic drugs. (A. Trabocchi et al. (2008) Amino Acids (2008) 34: 1-24). The hepatitis C virus protease inhibitor boceprevir (SCH 505034; ((1R,2S,5S)-N-(4-amino-1-cyclobutyl-3,4-dioxobutan-2-yl)-3-((S)-2-(3-tert-_{butylureido})-3,3-dimethylbutanoyl)-6,6-dimethyl-3-azabicyclo[3.1.0]hexane-2-carboxamide) (Malcolm et al. (2006) Antimicrob. Agents Chemother. 50(3): 1013 20) is shown below:

[chemical structure]

[0005] Boceprevir is prepared from the ester of the cis-fused bicyclic L-proline analogue (1R,2S,5S)-6,6-dimethyl-3-azabicyclo[3.1.0]hexane-2-carboxylic acid, which is shown below:

[chemical structure]

[0006] WO 2000/20824 and WO 2002/18369 describe numerous other hepatitis C protease inhibitors incorporating various fused bicyclic L-proline analogues.

[0007] Recently, the global SARS-CoV-2 (Covid-19) pandemic has inspired evaluations of the efficacy of existing peptidomimetic and small molecule protease inhibitors, including boceprevir, against the main coronavirus protease, M^{Pro} (Citarella et al. (2021) Biomolecules 2021:11(4:607). Various fused bicyclic L-proline analogues have been investigated for anti-viral activity against Covid-19 in a mouse model (Qiao et al. (2021) Science. 2021 Mar. 26; 371(6536):1374-1378). Indeed, a recent review of prospective coronavirus M^{Pro} inhibitors identified numerous fused bicyclic L-proline analogues among the most potent covalent inhibitors (Macip et al. (2021) Int J Mol Sci. 2021; 23(1):259). Thus, fused bicyclic L-proline analogues demonstrate potential for effective anti-viral activity across a spectrum of viral pathogens.

[0008] Therefore, efficient methods to synthesize fused bicyclic L-proline analogues are necessary to enable the development of novel compounds and treatments for existing and emerging viral threats.

[0009] Although the synthesis of such complex molecules using the methods and tools of organic chemistry have been reported; these syntheses generally are multi-step, intricate, expensive, and inefficient, processes of low overall yield.

[0010] Wu et al. (WO 2007/075790) discloses the production of the methyl ester of the bicyclic proline analogue (1R,2S,5S)-6,6-dimethyl-3-azabicyclo[3.1.0]hexane-2-carboxylic acid from the corresponding symmetrical (achiral) bicyclic amine of structural formula (1R,5S)-6,6-dimethyl-3-azabicyclo[3.1.0]hexane, beginning with its oxidation to the corresponding racemic imine of structural formula

[chemical structure]

[0011] The racemic imine is subsequently reacted with cyanide to provide the racemic aminonitrile of the following structural formula

[chemical structure]

[0012] which is then reacted with acid and methanol to give the racemic amino acid methyl ester of the following structural formulae

[chemical structure]

[0013] Finally, these (1R,2S, 5S) (undesired) and (1S,2R, 5R) (desired) stereoisomeric methyl esters are separated by diastereomeric salt resolution, forming either the di-p-tolyl-D-tartaric acid salt with the former enantiomer or the di-p-tolyl-L-tartaric tartaric acid salt with the latter enantiomer.

[0014] Tanoury et al. (WO 2007/022459) disclose the synthesis of racemic (t-butoxycarbonyl)octahydrocyclopenta[c]pyrrole-1-carboxylic acid from the corresponding symmetrical (achiral) bicyclic amine by making the N-Boc derivative, and reacting it with the pyrophoric agent, sec-butyllithium in the presence of more than a stoichiometric amount of a bulky diamine chelate, then carbon dioxide, all at below −70° C. to produce the racemic N-Boc amino acids depicted below:

[chemical structure]

[0015] The (1R,2S, 5S) (undesired) and (1S,2R, 5R) (desired) stereoisomers of these racemic Boc-acids are then separated by diastereomeric salt resolution using single enantiomer chiral bases such as S-1-aminotetralin.

[0016] Although the desired stereoisomer of the amino acid derivative is obtained by these methods, the resolution of a mixture of enantiomers of these bicyclic proline analogues inherently involves the waste of at least one half of all of the material (e.g. raw materials, reagents, solvents, catalysts) used in the production of the racemic mixture.

[0017] Monoamine oxidase enzymes have been used to resolve and deracemize racemic chiral amines via the stereospecific oxidation of one enantiomer to the corresponding imine using oxygen. Derivatives of the flavin dependent monoamine oxidase of Aspergillus niger (MAO N) (Shilling et al. (1995) Biochim. Biophys. Acta. 1243: 529 37) have been reported as useful, in combination with non-specific chemical reducing agents, for the deracemization of (d/1) a methylbenzylamine to provide enantiomerically pure (93% ee) (d) α methylbenzylamine (Alexeeva et al. (2002), Angew. Chem. Int. Ed. 41: 3177-3180). Derivatives of the flavin dependent monoamine oxidase of Aspergillus niger were also used for deracemization of (R/S)-2-phenypyrrolidine to provide enantiomerically pure (98% ee) (R)-2-phenypyrrolidine (Carr et al. (2005), ChemBioChem 6: 637 39; Gotor et al. “Enantioselective Enzymatic Desymmetrization in Organic Synthesis,” Chem. Rev. (2005) 105: 313-54).

[0018] Previously, an efficient, chemoenzymatic process for manufacture of the boceprevir bicyclic [3.1.0] proline intermediate using engineered monoamine oxidases was reported. Monoamine oxidases derived from A. niger and A. oryzae were engineered to improve solubility, thermostability, and activity on the 6,6-dimethyl-3-azabicyclo[3.1.0]hexane substrate (Li et al. (2012), J. Am. Chem. Soc.134, 6467-6472; WO2010008828). The optimized process then proceeded via sulfonation to a chiral aminosulfonate and cyanation to a trans-nitrile prior to transformation to the methyl ester under Pinner conditions (Li et al.)

[0019] However, production of large quantities of substantially-enantiomerically pure chiral compounds is limited by the enzyme loading required for synthesis. Therefore, it necessary to provide improved engineered enzymes with reduced enzyme loading (wt/wt) requirements for the manufacturing of APIs and intermediates.

### SUMMARY

[0020] The present invention provides novel biocatalysts and associated methods of use for the enzymatic oxidative desymmetrization of 6,6-dimethyl-3-azabicyclo[3.1.0]hexane and related bicyclic proline analogues to produce APIs and intermediates, including peptidomimetic antiviral compounds. The monoamine oxidase biocatalysts of the present disclosure are engineered polypeptide variants of a previously engineered monoamine oxidase (SEQ ID NO: 6) derived from a fusion polypeptide of Aspergillus niger (SEQ ID NO: 2) and Aspergillus oryzae (SEQ ID NO: 4) monoamine oxidase homologs. These engineered monoamine oxidase polypeptides are capable of catalyzing the conversion of 6,6-dimethyl-3-azabicyclo[3.1.0]hexane and related bicyclic proline analogs to (1R,5S)-6,6-dimethyl-3-azabicyclo[3.1.0]hex-2-ene and related compounds.

[0021] The present invention provides an engineered polypeptide comprising an amino acid sequence with at least 80%, 85%, 90%, 91%, 92%, 93%, 94%, 95%, 96%, 97%, 98%, 99% sequence identity to a reference sequence of SEQ ID NO: 6, comprising at least one substitution or one substitution set at one or more positions selected from 13, 32/65/135/246/284, 32/135/284, 32/284, 47/197, 55/347/348, 61, 65/135, 65/190, 65/246, 65/284, 79, 80, 82, 85, 87, 87/185, 93, 100, 100/144/421/447, 100/144/447, 104, 107, 113, 114, 115, 117, 127, 135, 136, 144, 144/447, 145, 146, 147, 149, 149/157, 153, 155, 161, 162, 166, 167, 169, 170, 174, 177, 181, 184, 185, 187/242, 193, 196, 198, 199, 208, 211, 218, 219, 219/332, 221, 229, 232, 234, 238, 239, 240, 242, 246, 250, 252, 254, 260, 262/266/421, 262/421/447, 266/447, 277, 277/347, 284, 290, 292, 294, 298, 300, 306, 310, 323, 332, 338, 347, 349, 359, 361, 366, 381, 385, 386, 387, 392, 393, 400, 407, 411/445, 413, 418, 421, 425, 429, 433, 434, 441, 444, 445, 447, 449, 452, 475, and 483, wherein the positions are numbered with reference to SEQ ID NO: 6. In some additional embodiments, the engineered polypeptide comprises at least one substitution or one substitution set selected from 13G, 32G/65V/135Q/246M/284D, 32G/135Q/284D, 32G/284D, 47A/197N, 55A/347D/348K, 61C, 65V/135Q, 65V/190D, 65V/246M, 65V/284D, 79A, 79D, 79Q, 79S, 79V, 79Y, 80H, 80I, 80N, 80T, 80V, 82F, 82L, 82R, 82W, 85D, 85S, 87G, 87H, 87L, 87Q/185F, 87S, 87W, 87Y, 93G, 100P, 100P/144E/421S/447A, 100P/144E/447A, 104K, 107W, 113G, 113W, 114G, 115M, 117A, 117C, 117I, 117K, 117L, 117R, 117S, 117T, 127D, 127G, 127R, 135G, 136R, 144E/447A, 144M, 145G, 145L, 145S, 146A, 146F, 147A, 149M, 149M/157A, 149V, 153T, 155C, 155L, 155Q, 155R, 161D, 161L, 161R, 161Y, 162Q, 166E, 166G, 166L, 167C, 169G, 170K, 174G, 174S, 174T, 174V, 177G, 177R, 177W, 181C, 181G, 181L, 181P, 184F, 184R, 185G, 185K, 185L, 185R, 187P/242I, 193A, 196G, 196M, 198D, 199I, 199T, 199V, 208S, 211G, 218G, 219P/332L, 219S, 221C, 221R, 221V, 229E, 232T, 234V, 238K, 238R, 239G, 240A, 242I, 246M, 250V, 252A, 252E, 252G, 252L, 254A, 260F, 260S, 260V, 262F/266L/421S, 262F/421S/447A, 266L/447A, 277T, 277T/347D, 284D, 290Q, 290Y, 292N, 294V, 298C, 300R, 306V, 3105, 323R, 332G, 332L, 332S, 338A, 338G, 338S, 347D, 347N, 349E, 359S, 361L, 366G, 381A, 385G, 386E, 386G, 387I, 387Q, 387W, 392G, 392S, 393G, 393K, 393M, 400D, 407G, 411V/445R, 413R, 418A, 418G, 4215, 425L, 429G, 433N, 433S, 434E, 441H, 444D, 444L, 444R, 444S, 445D, 445R, 447A, 449R, 449S, 452M, 475E, 475I, 475L, 4755, and 483R, wherein the positions are numbered with reference to SEQ ID NO: 6. In some embodiments, the engineered polypeptide comprises at least one substitution or one substitution set selected from T13G, E32G/T65V/T135Q/I246M/N284D, E32G/T135Q/N284D, E32G/N284D, G47A/D197N, T55A/C347D/P348K, A61C, T65V/T135Q, T65V/E190D, T65V/I246M, T65V/N284D, W79A, W79D, W79Q, W79S, W79V, W79Y, S80H, S80I, S80N, S80T, S80V, N82F, N82L, N82R, N82W, G85D, G85S, P87G, P87H, P87L, P87Q/E185F, P87S, P87W, P87Y, T93G, S100P, S100P/A144E/C421S/C447A, S100P/A144E/C447A, R104K, T107W, N113G, N113W, A114G, L115M, P117A, P117C, P117I, P117K, P117L, P117R, P117S, P117T, H127D, H127G, H127R, T135G, T136R, A144E/C447A, A144M, E145G, E145L, E145S, D146A, D146F, E147A, L149M, L149M/T157A, L149V, L153T, K155C, K155L, K155Q, K155R, G161D, G161L, G161R, G161Y, T162Q, T166E, T166G, T166L, V167C, P169G, F170K, M174G, M174S, M174T, M174V, V177G, V177R, V177W, R181C, R181G, R181L, R181P, D184F, D184R, E185G, E185K, E185L, E185R, S187P/M242I, D193A, R196G, R196M, E198D, L199I, L199T, L199V, E208S, I211G, T218G, L219P/I332L, L219S, N221C, N221R, N221V, H229E, A232T, S234V, Y238K, Y238R, Q239G, G240A, M242I, 1246M, F250V, D252A, D252E, D252G, D252L, Q254A, R260F, R260S, R260V, W262F/A266L/C421S, W262F/C421S/C447A, A266L/C447A, C277T, C277T/C347D, N284D, R290Q, R290Y, T292N, R294V, E298C, A300R, C306V, L310S, S323R, I332G, I332L, I332S, C338A, C338G, C338S, C347D, C347N, D349E, P359S, N361L, A366G, C381A, A385G, H386E, H386G, N387I, N387Q, N387W, E392G, E392S, E393G, E393K, E393M, M400D, P407G, D411V/L445R, K413R, H418A, H418G, C421S, F425L, A429G, A433N, A433S, P434E, S441H, E444D, E444L, E444R, E444S, L445D, L445R, C447A, H449R, H449S, V452M, T475E, T475I, T475L, T475S, and E483R, wherein the positions are numbered with reference to SEQ ID NO: 6. In some further embodiments, the engineered polypeptide comprises an amino acid sequence with at least 80% sequence identity to any even-numbered sequence set forth in SEQ ID NO: 8 to SEQ ID NO: 414.

[0022] The present invention also provides an engineered polypeptide comprising an amino acid sequence with at least 80%, 85%, 90%, 91%, 92%, 93%, 94%, 95%, 96%, 97%, 98%, 99% sequence identity to a reference sequence of SEQ ID NO: 6, comprising at least one substitution or one substitution set selected from 79, 80, 87, 146, 149, 219/332, 238, 260, 262/266/421, 338, and 429, wherein the positions are numbered with reference to SEQ ID NO: 6. In some embodiments, the engineered polypeptide comprises at least one substitution or one substitution set selected from 79D, 80V, 87G, 146A, 149M, 219P/332L, 238R, 260S, 262F/266L/421S, 338G, and 429G, wherein the positions are numbered with reference to SEQ ID NO: 6. In some further embodiments, the engineered polypeptide comprises at least one substitution or one substitution set selected from W79D, S80V, P87G, D146A, L149M, L219P/I332L, Y238R, R260S, W262F/A266L/C421S, C338G, and A429G, wherein the positions are numbered with reference to SEQ ID NO: 6.

[0023] The present invention further provides an engineered polypeptide comprising an amino acid sequence with at least 80%, 85%, 90%, 91%, 92%, 93%, 94%, 95%, 96%, 97%, 98%, 99% sequence identity to a reference sequence of SEQ ID NO: 6, comprising at least at least one substitution or one substitution set selected from 79, 79/80, 79/80/332/429, 79/93, 79/93/238/386/429, 79/93/386, 79/183/284/332, 79/238, 79/238/332/429, 79/238/429, 80, 80/183/284/332/381/386/429, 80/188/190/332/386, 80/237/332, 80/238/332, 80/238/386/429, 80/284, 80/284/386, 80/332, 80/332/381/386, 80/332/386, 80/381, 80/386, 80/386/429, 80/429, 82, 82/87, 82/87/113, 82/87/113/117/218, 82/87/113/117/219, 82/87/113/117/219/418, 82/87/113/117/260/338, 82/87/113/117/338/418, 82/87/113/421, 82/87/117, 82/87/117/218/421, 82/87/117/260/338/421, 82/87/117/338/418, 82/87/218, 82/87/218/219/338, 82/87/218/219/421, 82/87/218/338, 82/87/219, 82/87/219/421, 82/87/338, 82/87/338/418, 82/87/338/421, 82/113/218/338, 82/113/218/338/418, 82/113/219/338, 82/113/338, 82/218/219/421, 82/260/338/421, 82/338/418/421, 82/418, 87, 87/113, 87/113/117/219/338/418/421, 87/113/117/260/338/421, 87/113/117/418/421, 87/113/218/219/260/338, 87/113/219/421, 87/113/260, 87/117, 87/117/218/219, 87/117/219/310/338, 87/218, 87/218/219, 87/218/219/338, 87/218/418, 87/219, 87/219/338, 87/219/418, 87/260, 87/310, 87/310/338, 87/338, 87/418, 87/421, 93/184/429, 93/238, 93/238/284, 93/238/386, 93/238/386/429, 100, 100/143/145/146/149/198/242/347/348/445/447, 100/143/145/149/347/447, 100/145/146/149, 100/145/146/149/154/348/445, 100/145/146/149/198, 100/145/146/149/198/242/250/252/347/348/447, 100/145/146/149/205/347/445/447, 100/145/146/149/242/445, 100/145/146/149/250/277/347/348/447, 100/145/149/154/246/277, 100/145/149/198/242/246/277/348/447, 100/145/149/198/242/246/445/447, 100/145/149/198/242/277/347/348/447, 100/145/149/198/252/348/445, 100/145/149/205, 100/145/149/242/246/277/347/445, 100/145/149/242/246/347/348/445/447, 100/145/149/242/445/447, 100/145/149/246/252/277/347/445/447, 100/145/149/246/347/445, 100/145/149/277/348/445, 100/145/149/347/445/447, 100/145/198/242/246/348, 100/145/198/277/348/445, 100/145/198/300, 100/145/205/246/277/348/445, 100/145/205/277/348, 100/145/242/246/277/445/447, 100/145/246/347/348/445, 100/145/277/347, 100/145/348, 100/146/149/198/242/246/277/347/348/445/447, 100/146/198/347/348/447, 100/146/198/445, 100/146/242/277/447, 100/146/250/447, 100/146/347/348/445/447, 100/149/198, 100/149/242/246/277/347/348/445, 100/149/242/246/277/347/348/447, 100/149/242/347/348/447, 100/149/246/277/348/445, 100/149/246/447, 100/149/250/347/447, 100/198/205/348, 100/198/277/347/348, 100/198/347/348, 100/198/347/348/445, 100/198/347/445, 100/198/447, 100/242/246/277, 100/242/246/347, 100/242/277/348, 100/242/347/348/445, 100/242/347/348/445/447, 100/242/348/445, 100/246/277/348/445, 100/277/347/445/447, 100/277/348, 100/277/348/447, 100/347/348/445, 100/347/447, 100/445/447, 110/338/418, 113/218/338/421, 113/338, 113/338/421, 117/219, 117/260, 121/198/347/445/447, 145/146/149/154/246/277/347/348, 145/146/149/198/242/252/277/347, 145/146/149/198/277/445/447, 145/146/149/205/348/447, 145/146/149/250/277/347/348/447, 145/146/149/277/347, 145/146/149/347/348, 145/146/198/205/242/277/348/447, 145/146/198/445/447, 145/146/246/277/447, 145/146/246/347/348/447, 145/146/277/347, 145/146/347/447, 145/149/198/205/348, 145/149/198/242/246/277/347/447, 145/149/198/242/246/348, 145/149/198/242/277/347, 145/149/198/246/447, 145/149/198/347/447, 145/149/205/242/347/348/445, 145/149/205/246/250/252, 145/149/205/277/445, 145/149/242, 145/149/242/348, 145/149/246, 145/149/246/347/445, 145/149/246/447, 145/149/347/348/445, 145/149/347/447, 145/149/447, 145/155/445/447, 145/198/205/348, 145/246, 145/246/252/347/447, 145/250/252/348, 145/252/348/447, 145/255, 145/277/347/445, 145/277/348/447, 145/347/348/445/447/491, 145/445/447, 146/149/151/246/348, 146/149/242/246/445, 146/149/246/252/447, 146/149/277/348/447, 146/198/246/277, 146/198/277/348/447, 146/242, 146/242/246/277/347/348/445/447, 146/246/277/348/445/447, 146/277, 146/277/347/348, 146/277/347/445/447, 146/277/445/447, 146/347/348/447, 146/348, 146/445/447, 149, 149/198/277/347/348, 149/198/348, 149/198/445, 149/242/246, 149/242/246/348/445, 149/347/348/445/447, 149/445, 184, 184/284, 184/284/429, 184/386, 198/242/348, 198/246, 198/250, 198/277/348/447, 198/445, 205, 205/246/347, 205/252/347/445/447, 205/347/348/445/447, 218, 218/260/338, 219, 219/338/418, 219/421, 238, 238/242/284, 238/284/386/429, 238/332/429, 238/381/429, 238/386, 238/429, 242, 242/277/347/348, 242/284/381/429, 242/348, 242/445/447, 246, 246/277/348/447, 246/445/447, 260, 260/338, 260/338/418/421, 277/347/348/445, 277/347/447, 284, 284/332, 284/386, 284/386/429, 310/338/418, 310/418/421, 332, 332/386, 332/429, 338, 338/418, 347/348/445, 347/348/447, 348, 348/445/447, 348/447, 386, 386/429, 418, 429, and 447, wherein the positions are numbered with reference to SEQ ID NO: 6. In some additional embodiments, the engineered polypeptide comprises at least one substitution or one substitution set selected from 79A/80H, 79A/93G/238R/386E/429G, 79A/93G/386E, 79A/238R, 79A/238R/332G/429G, 79A/238R/429G, 79D, 79D/80V, 79D/80V/332G/429G, 79D/93G, 79D/183F/284D/332G, 80H, 80H/183F/284D/332G/381A/386E/429G, 80H/188F/190D/332G/386E, 80H/238R/386E/429G, 80H/332G/381A/386E, 80H/381A, 80H/386E, 80H/429G, 80V, 80V/237S/332G, 80V/238R/332G, 80V/284D, 80V/284D/386E, 80V/332G, 80V/332G/386E, 80V/386E, 80V/386E/429G, 82F, 82F/87G/113G/117K/219S, 82F/87G/113G/117K/260S/338G, 82F/87G/117K, 82F/87G/218G, 82F/87G/218G/219S/421S, 82F/87G/218G/338S, 82F/87G/338S/418G, 82F/87L, 82F/87L/113G/117K/218G, 82F/87L/113G/117K/219S/418G, 82F/87L/113G/117K/338G/418G, 82F/87L/117K, 82F/87L/219S/421S, 82F/87L/338S, 82F/113G/218G/338S/418G, 82F/418G, 82R/87G, 82R/87G/113G/421S, 82R/87G/117K/218G/421S, 82R/87G/117K/260S/338S/4215, 82R/87G/117K/338A/418G, 82R/87L, 82R/87L/113G, 82R/87L/218G/219S/338S, 82R/87L/219S, 82R/87L/338G/421S, 82R/113G/218G/338A, 82R/113G/219S/338S, 82R/113G/338S, 82R/218G/219S/421S, 82R/260S/338A/421S, 82R/338A/418G/421S, 87G, 87G/113G, 87G/113G/117K/418G/421S, 87G/113G/260S, 87G/117K/219S/310S/338S, 87G/218G/219S/338S, 87G/219S, 87G/260S, 87G/310S, 87G/310S/338S, 87G/338A, 87G/418G, 87L, 87L/113G, 87L/113G/117K/219S/338G/418G/421S, 87L/113G/117K/260S/338S/421S, 87L/113G/218G/219S/260S/338A, 87L/113G/219S/421S, 87L/117K, 87L/117K/218G/219S, 87L/218G, 87L/218G/219S, 87L/218G/418G, 87L/219S, 87L/219S/338G, 87L/219S/418G, 87L/338A, 87L/421S, 93G/184R/429G, 93G/238R, 93G/238R/284D, 93G/238R/386E, 93G/238R/386E/429G, 100P, 100P/143D/145S/146A/149M/198D/242I/347N/348K/445R/447A, 100P/143V/145G/149M/347N/447A, 100P/145G/146A/149M/250V/277T/347N/348K/447A, 100P/145G/149M/154L/246M/277T, 100P/145G/149M/198D/242I/246M/445R/447A, 100P/145G/149M/198D/252G/348K/445R, 100P/145G/149M/205T, 100P/145G/149M/242I/246M/347D/348K/445R/447A, 100P/145G/149M/242I/445R/447A, 100P/145G/198D/242I/246M/348K, 100P/145G/198D/277T/348K/445R, 100P/145G/198D/300V, 100P/145G/205T/246M/277T/348K/445R, 100P/145G/242I/246M/277T/445R/447A, 100P/145G/348K, 100P/145S/146A/149M, 100P/145S/146A/149M/154L/348K/445R, 100P/145S/146A/149M/198D, 100P/145S/146A/149M/198D/242I/250V/252G/347N/348K/447A, 100P/145S/146A/149M/205T/347D/445R/447A, 100P/145S/146A/149M/242I/445R, 100P/145S/149M/198D/242I/246M/277T/348K/447A, 100P/145S/149M/198D/242I/277T/347N/348K/447A, 100P/145S/149M/242I/246M/277T/347N/445R, 100P/145S/149M/246M/252G/277T/347N/445R/447A, 100P/145S/149M/246M/347N/445R, 100P/145S/149M/277T/348K/445R, 100P/145S/149M/347N/445R/447A, 100P/145S/205T/277T/348K, 100P/145S/246M/347N/348K/445R, 100P/145S/277T/347N, 100P/146A/149M/198D/242I/246M/277T/347D/348K/445R/447A, 100P/146A/198D/347D/348K/447A, 100P/146A/198D/445R, 100P/146A/242I/277T/447A, 100P/146A/250V/447A, 100P/146A/347D/348K/445R/447A, 100P/149M/198D, 100P/149M/242I/246M/277T/347N/348K/445R, 100P/149M/242I/246M/277T/347N/348K/447A, 100P/149M/242I/347N/348K/447A, 100P/149M/246M/277T/348K/445R, 100P/149M/246M/447A, 100P/149M/250V/347N/447A, 100P/198D/205T/348K, 100P/198D/277T/347N/348K, 100P/198D/347D/348K, 100P/198D/347D/348K/445R, 100P/198D/347N/445R, 100P/198D/447A, 100P/242I/246M/277T, 100P/242I/246M/347N, 100P/242I/277T/348K, 100P/242I/347D/348K/445R, 100P/242I/347D/348K/445R/447A, 100P/242I/348K/445R, 100P/246M/277T/348K/445R, 100P/277T/347D/445R/447A, 100P/277T/348K, 100P/277T/348K/447A, 100P/347N/348K/445R, 100P/347N/447A, 100P/445R/447A, 110N/338G/418G, 113G/218G/338S/421S, 113G/338A/421S, 113G/338G, 117K/219S, 117K/260S, 121C/198D/347N/445R/447A, 145G/146A/149M/277T/347D, 145G/146A/149M/347D/348K, 145G/146A/277T/347N, 145G/146A/347D/447A, 145G/149M/198D/347N/447A, 145G/149M/205T/242I/347N/348K/445R, 145G/149M/205T/246M/250V/252G, 145G/149M/242I/348K, 145G/149M/246M, 145G/155I/445R/447A, 145G/198D/205T/348K, 145G/250V/252G/348K, 145G/255R, 145G/277T/347N/445R, 145S/146A/149M/154L/246M/277T/347N/348K, 145S/146A/149M/198D/242I/252G/277T/347N, 145S/146A/149M/198D/277T/445R/447A, 145S/146A/149M/205T/348K/447A, 145S/146A/149M/250V/277T/347D/348K/447A, 145S/146A/198D/205T/242I/277T/348K/447A, 145S/146A/198D/445R/447A, 145S/146A/246M/277T/447A, 145S/146A/246M/347N/348K/447A, 145S/149M/198D/205T/348K, 145S/149M/198D/242I/246M/277T/347N/447A, 145S/149M/198D/242I/246M/348K, 145S/149M/198D/242I/277T/347D, 145S/149M/198D/246M/447A, 145S/149M/205T/277T/445R, 145S/149M/242I, 145S/149M/246M/347D/445R, 145S/149M/246M/447A, 145S/149M/347N/348K/445R, 145S/149M/347N/447A, 145S/149M/447A, 145S/246M, 145S/246M/252G/347D/447A, 145S/252G/348K/447A, 145S/277T/348K/447A, 145S/347D/348K/445R/447A/491A, 145S/445R/447A, 146A/149M/151C/246M/348K, 146A/149M/242I/246M/445R, 146A/149M/246M/252G/447A, 146A/149M/277T/348K/447A, 146A/198D/246M/277T, 146A/198D/277T/348K/447A, 146A/242I, 146A/242I/246M/277T/347N/348K/445R/447A, 146A/246M/277T/348K/445R/447A, 146A/277T, 146A/277T/347N/348K, 146A/277T/347N/445R/447A, 146A/277T/445R/447A, 146A/347D/348K/447A, 146A/348K, 146A/445R/447A, 149M, 149M/198D/277T/347N/348K, 149M/198D/348K, 149M/198D/445R, 149M/242I/246M, 149M/242I/246M/348K/445R, 149M/347N/348K/445R/447A, 149M/445R, 184R, 184R/284D, 184R/284D/429G, 184R/386E, 198D/242I/348K, 198D/246M, 198D/250V, 198D/277T/348K/447A, 198D/445R, 205T, 205T/246M/347N, 205T/252G/347D/445R/447A, 205T/347D/348K/445R/447A, 218G, 218G/260S/338A, 219S, 219S/338A/418G, 219S/421S, 238R, 238R/242L/284D, 238R/284D/386E/429G, 238R/332G/429G, 238R/381A/429G, 238R/386E, 238R/429G, 242I, 242I/277T/347D/348K, 242I/348K, 242I/445R/447A, 242L/284D/381A/429G, 246M, 246M/277T/348K/447A, 246M/445R/447A, 260S, 260S/338G, 260S/338G/418G/421S, 277T/347N/348K/445R, 277T/347N/447A, 284D, 284D/332G, 284D/386E, 284D/386E/429G, 310S/338S/418G, 310S/418G/421S, 332G, 332G/386E, 332G/429G, 338G, 338G/418G, 347N/348K/445R, 347N/348K/447A, 348K, 348K/445R/447A, 348K/447A, 386E, 386E/429G, 418G, 429G, and 447A, wherein the positions are numbered with reference to SEQ ID NO: 6. In some further embodiments, the engineered polypeptide comprises at least at least one substitution or one substitution set selected from W79A/S80H, W79A/T93G/Y238R/H386E/A429G, W79A/T93G/H386E, W79A/Y238R, W79A/Y238R/I332G/A429G, W79A/Y238R/A429G, W79D, W79D/S80V, W79D/S80V/I332G/A429G, W79D/T93G, W79D/Y183F/N284D/I332G, S80H, S80H/Y183F/N284D/I332G/C381A/H386E/A429G, S80H/Y188F/E190D/I332G/H386E, S80H/Y238R/H386E/A429G, S80H/I332G/C381A/H386E, S80H/C381A, S80H/H386E, S80H/A429G, S80V, S80V/T237S/I332G, S80V/Y238R/I332G, S80V/N284D, S80V/N284D/H386E, S80V/I332G, S80V/I332G/H386E, S80V/H386E, S80V/H386E/A429G, N82F, N82F/P87G/N113G/P117K/L219S, N82F/P87G/N113G/P117K/R260S/C338G, N82F/P87G/P117K, N82F/P87G/T218G, N82F/P87G/T218G/L219S/C421S, N82F/P87G/T218G/C338S, N82F/P87G/C338S/H418G, N82F/P87L, N82F/P87L/N113G/P117K/T218G, N82F/P87L/N113G/P117K/L219S/H418G, N82F/P87L/N113G/P117K/C338G/H418G, N82F/P87L/P117K, N82F/P87L/L219S/C421S, N82F/P87L/C338S, N82F/N113G/T218G/C338S/H418G, N82F/H418G, N82R/P87G, N82R/P87G/N113G/C421S, N82R/P87G/P117K/T218G/C421S, N82R/P87G/P117K/R260S/C338S/C421S, N82R/P87G/P117K/C338A/H418G, N82R/P87L, N82R/P87L/N113G, N82R/P87L/T218G/L219S/C338S, N82R/P87L/L219S, N82R/P87L/C338G/C421S, N82R/N113G/T218G/C338A, N82R/N113G/L219S/C338S, N82R/N113G/C338S, N82R/T218G/L219S/C421S, N82R/R260S/C338A/C421S, N82R/C338A/H418G/C421S, P87G, P87G/N113G, P87G/N113G/P117K/H418G/C421S, P87G/N113G/R260S, P87G/P117K/L219S/L310S/C338S, P87G/T218G/L219S/C338S, P87G/L219S, P87G/R260S, P87G/L310S, P87G/L310S/C338S, P87G/C338A, P87G/H418G, P87L, P87L/N113G, P87L/N113G/P117K/L219S/C338G/H418G/C421S, P87L/N113G/P117K/R260S/C338S/C421S, P87L/N113G/T218G/L219S/R260S/C338A, P87L/N113G/L219S/C421S, P87L/P117K, P87L/P117K/T218G/L219S, P87L/T218G, P87L/T218G/L219S, P87L/T218G/H418G, P87L/L219S, P87L/L219S/C338G, P87L/L219S/H418G, P87L/C338A, P87L/C421S, T93G/D184R/A429G, T93G/Y238R, T93G/Y238R/N284D, T93G/Y238R/H386E, T93G/Y238R/H386E/A429G, S100P, S100P/E143D/E145S/D146A/L149M/E198D/M242I/C347N/P348K/L445R/C447A, S100P/E143V/E145G/L149M/C347N/C447A, S100P/E145G/D146A/L149M/F250V/C277T/C347N/P348K/C447A, S100P/E145G/L149M/H154L/I246M/C277T, S100P/E145G/L149M/E198D/M242I/I246M/L445R/C447A, S100P/E145G/L149M/E198D/D252G/P348K/L445R, S100P/E145G/L149M/S205T, S100P/E145G/L149M/M242U/246M/C347D/P348K/L445R/C447A, S100P/E145G/L149M/M242I/L445R/C447A, S100P/E145G/E198D/M242I/I246M/P348K, S100P/E145G/E198D/C277T/P348K/L445R, S100P/E145G/E198D/A300V, S100P/E145G/S205T/I246M/C277T/P348K/L445R, S100P/E145G/M242I/I246M/C277T/L445R/C447A, S100P/E145G/P348K, S100P/E145S/D146A/L149M, S100P/E145S/D146A/L149M/H154L/P348K/L445R, S100P/E145S/D146A/L149M/E198D, S100P/E145S/D146A/L149M/E198D/M242I/F250V/D252G/C347N/P348K/C447A, S100P/E145S/D146A/L149M/S205T/C347D/L445R/C447A, S100P/E145S/D146A/L149M/M242I/L445R, S100P/E145S/L149M/E198D/M242I/I246M/C277T/P348K/C447A, S100P/E145S/L149M/E198D/M242I/C277T/C347N/P348K/C447A, S100P/E145S/L149M/M242I/I246M/C277T/C347N/L445R, S100P/E145S/L149M/I246M/D252G/C277T/C347N/L445R/C447A, S100P/E145S/L149M/I246M/C347N/L445R, S100P/E145S/L149M/C277T/P348K/L445R, S100P/E145S/L149M/C347N/L445R/C447A, S100P/E145S/S205T/C277T/P348K, S100P/E145S/I246M/C347N/P348K/L445R, S100P/E145S/C277T/C347N, S100P/D146A/L149M/E198D/M242I/I246M/C277T/C347D/P348K/L445R/C447A, S100P/D146A/E198D/C347D/P348K/C447A, S100P/D146A/E198D/L445R, S100P/D146A/M242I/C277T/C447A, S100P/D146A/F250V/C447A, S100P/D146A/C347D/P348K/L445R/C447A, S100P/L149M/E198D, S100P/L149M/M242U/246M/C277T/C347N/P348K/L445R, S100P/L149M/M242U/246M/C277T/C347N/P348K/C447A, S100P/L149M/M242I/C347N/P348K/C447A, S100P/L149M/I246M/C277T/P348K/L445R, S100P/L149M/I246M/C447A, S100P/L149M/F250V/C347N/C447A, S100P/E198D/S205T/P348K, S100P/E198D/C277T/C347N/P348K, S100P/E198D/C347D/P348K, S100P/E198D/C347D/P348K/L445R, S100P/E198D/C347N/L445R, S100P/E198D/C447A, S100P/M242I/I246M/C277T, S100P/M242I/I246M/C347N, S100P/M242I/C277T/P348K, S100P/M242I/C347D/P348K/L445R, S100P/M242I/C347D/P348K/L445R/C447A, S100P/M242I/P348K/L445R, S100P/I246M/C277T/P348K/L445R, S100P/C277T/C347D/L445R/C447A, S100P/C277T/P348K, S100P/C277T/P348K/C447A, S100P/C347N/P348K/L445R, S100P/C347N/C447A, S100P/L445R/C447A, K110N/C338G/H418G, N113G/T218G/C338S/C421S, N113G/C338A/C421S, N113G/C338G, P117K/L219S, P117K/R260S, F121C/E198D/C347N/L445R/C447A, E145G/D146A/L149M/C277T/C347D, E145G/D146A/L149M/C347D/P348K, E145G/D146A/C277T/C347N, E145G/D146A/C347D/C447A, E145G/L149M/E198D/C347N/C447A, E145G/L149M/S205T/M242I/C347N/P348K/L445R, E145G/L149M/S205T/I246M/F250V/D252G, E145G/L149M/M242I/P348K, E145G/L149M/I246M, E145G/K155I/L445R/C447A, E145G/E198D/S205T/P348K, E145G/F250V/D252G/P348K, E145G/S255R, E145G/C277T/C347N/L445R, E145S/D146A/L149M/H154L/I246M/C277T/C347N/P348K, E145S/D146A/L149M/E198D/M242I/D252G/C277T/C347N, E145S/D146A/L149M/E198D/C277T/L445R/C447A, E145S/D146A/L149M/S205T/P348K/C447A, E145S/D146A/L149M/F250V/C277T/C347D/P348K/C447A, E145S/D146A/E198D/S205T/M242I/C277T/P348K/C447A, E145S/D146A/E198D/L445R/C447A, E145S/D146A/I246M/C277T/C447A, E145S/D146A/I246M/C347N/P348K/C447A, E145S/L149M/E198D/S205T/P348K, E145S/L149M/E198D/M242I/I246M/C277T/C347N/C447A, E145S/L149M/E198D/M242I/I246M/P348K, E145S/L149M/E198D/M242I/C277T/C347D, E145S/L149M/E198D/I246M/C447A, E145S/L149M/S205T/C277T/L445R, E145S/L149M/M242I, E145S/L149M/I246M/C347D/L445R, E145S/L149M/I246M/C447A, E145S/L149M/C347N/P348K/L445R, E145S/L149M/C347N/C447A, E145S/L149M/C447A, E145S/I246M, E145S/I246M/D252G/C347D/C447A, E145S/D252G/P348K/C447A, E145S/C277T/P348K/C447A, E145S/C347D/P348K/L445R/C447A/V491A, E145S/L445R/C447A, D146A/L149M/S151C/I246M/P348K, D146A/L149M/M242I/I246M/L445R, D146A/L149M/I246M/D252G/C447A, D146A/L149M/C277T/P348K/C447A, D146A/E198D/I246M/C277T, D146A/E198D/C277T/P348K/C447A, D146A/M242I, D146A/M242I/I246M/C277T/C347N/P348K/L445R/C447A, D146A/I246M/C277T/P348K/L445R/C447A, D146A/C277T, D146A/C277T/C347N/P348K, D146A/C277T/C347N/L445R/C447A, D146A/C277T/L445R/C447A, D146A/C347D/P348K/C447A, D146A/P348K, D146A/L445R/C447A, L149M, L149M/E198D/C277T/C347N/P348K, L149M/E198D/P348K, L149M/E198D/L445R, L149M/M242I/I246M, L149M/M242I/I246M/P348K/L445R, L149M/C347N/P348K/L445R/C447A, L149M/L445R, D184R, D184R/N284D, D184R/N284D/A429G, D184R/H386E, E198D/M242I/P348K, E198D/I246M, E198D/F250V, E198D/C277T/P348K/C447A, E198D/L445R, S205T, S205T/I246M/C347N, S205T/D252G/C347D/L445R/C447A, S205T/C347D/P348K/L445R/C447A, T218G, T218G/R260S/C338A, L219S, L219S/C338A/H418G, L219S/C421S, Y238R, Y238R/M242L/N284D, Y238R/N284D/H386E/A429G, Y238R/I332G/A429G, Y238R/C381A/A429G, Y238R/H386E, Y238R/A429G, M242I, M242I/C277T/C347D/P348K, M242I/P348K, M242I/L445R/C447A, M242L/N284D/C381A/A429G, I246M, I246M/C277T/P348K/C447A, I246M/L445R/C447A, R260S, R260S/C338G, R260S/C338G/H418G/C421S, C277T/C347N/P348K/L445R, C277T/C347N/C447A, N284D, N284D/I332G, N284D/H386E, N284D/H386E/A429G, L310S/C338S/H418G, L310S/H418G/C421S, I332G, I332G/H386E, I332G/A429G, C338G, C338G/H418G, C347N/P348K/L445R, C347N/P348K/C447A, P348K, P348K/L445R/C447A, P348K/C447A, H386E, H386E/A429G, H418G, A429G, and C447A, wherein the positions are numbered with reference to SEQ ID NO: 6. In some additional embodiments, the engineered polypeptide comprises an amino acid sequence with at least 80% sequence identity to any even-numbered sequence set forth in SEQ ID NO: 416 to SEQ ID NO: 994.

[0024] The present invention also provides an engineered polypeptide comprising an amino acid sequence with at least 80%, 85%, 90%, 91%, 92%, 93%, 94%, 95%, 96%, 97%, 98%, 99% sequence identity to a reference sequence of SEQ ID NO: 6, comprising at least one substitution or one substitution set selected from 80/429, 87/113/117/260/338/421, 87/421, 100/145/146/149/198/242/250/252/347/348/447, 100/145/149/198/242/277/347/348/447, 110/338/418, 145/149/205/246/250/252, 145/246/252/347/447, 145/252/348/447, 238/386/429, and 242/284/381/429, wherein the positions are numbered with reference to SEQ ID NO: 6. In some embodiments, the engineered polypeptide comprises at least one substitution or one substitution set selected from 80H/429G, 87L/113G/117K/260S/338S/4215, 87L/421S, 100P/145S/146A/149M/198D/242I/250V/252G/347N/348K/447A, 100P/145S/149M/198D/242I/277T/347N/348K/447A, 110N/338G/418G, 145G/149M/205T/246M/250V/252G, 145S/246M/252G/347D/447A, 145S/252G/348K/447A, 238R/386E/429G, and 242L/284D/381A/429G, wherein the positions are numbered with reference to SEQ ID NO: 6. In some further embodiments, the engineered polypeptide comprises at least one substitution or one substitution set selected from S80H/A429G, P87L/N113G/P117K/R260S/C338S/C421S, P87L/C421S, S100P/E145S/D146A/L149M/E198D/M242I/F250V/D252G/C347N/P348K/C447A, S100P/E145S/L149M/E198D/M242I/C277T/C347N/P348K/C447A, K110N/C338G/H418G, E145G/L149M/S205T/I246M/F250V/D252G, E145S/I246M/D252G/C347D/C447A, E145S/D252G/P348K/C447A, Y238R/H386E/A429G, and M242L/N284D/C381A/A429G, wherein the positions are numbered with reference to SEQ ID NO: 6.

[0025] The present invention also provides an engineered polypeptide comprising an amino acid sequence with at least 80%, 85%, 90%, 91%, 92%, 93%, 94%, 95%, 96%, 97%, 98%, 99% sequence identity to a reference sequence of SEQ ID NO: 414, comprising at least one substitution or one substitution set at one or more positions selected from 87/113/145/198/242/246/262/266, 87/117/149/242, 87/117/242/260/266, 87/145/149/198/447, 87/149/242/260/266, 87/149/260/262/266/381, 87/198, 87/242/246/260/262/266/338, 87/284/338/347, 113/117/146/149/260/262, 113/117/266/381, 113/117/447, 113/145/146/149/242/447, 113/242/347, 113/242/381, 117/145/146/262/284, 117/145/149/284/447, 117/149, 117/198, 117/198/262, 117/242/246/260/266/284/381, 117/242/260/262, 117/246/260/262/381, 117/246/284, 117/266, 145/146/149/260/262/338/347, 145/146/242/260/262/338/347/447, 145/149/198/260/266/338/347, 145/149/260/266/338/347/381/447, 146/149/260/262/347, 149/198/246/260/266/421, 198/447, 242, 242/246, 242/246/338/347, 242/260/262/338, 242/381, 246, 260/262/277/284/447, 260/266, 262, 347/381, and 447, wherein the positions are numbered with reference to SEQ ID NO: 414. In some additional embodiments, the engineered polypeptide comprises at least one substitution or one substitution set selected from 87G/113G/145L/198D/242I/246M/262F/266L, 87G/117K/149M/242I, 87G/145L/149M/198D/447A, 87G/149M/242I/260S/266L, 87L/117K/242I/260S/266L, 87L/149M/260S/262F/266L/381A, 87L/198D, 87L/242I/246M/260S/262F/266L/338G, 87L/284D/338G/347N, 113G/117K/146A/149M/260S/262F, 113G/117K/266L/381A, 113G/117K/447A, 113G/145L/146A/149M/242I/447A, 113G/242I/347N, 113G/242I/381A, 117K/145L/146A/262F/284D, 117K/145L/149M/284D/447A, 117K/149M, 117K/198D, 117K/198D/262F, 117K/242I/246M/260S/266L/284D/381A, 117K/242I/260S/262F, 117K/246M/260S/262F/381A, 117K/246M/284D, 117K/266L, 145L/146A/149M/260S/262F/338G/347N, 145L/146A/242I/260S/262F/338G/347N/447A, 145L/149M/198D/260S/266L/338G/347N, 145L/149M/260S/266L/338G/347N/381A/447A, 146A/149M/260S/262F/347N, 149M/198D/246M/260S/266L/421S, 198D/447A, 242I, 242I/246M, 242I/246M/338G/347N, 242I/260S/262F/338G, 242I/381A, 246M, 260S/262F/277T/284D/447A, 260S/266L, 262F, 347N/381A, and 447A, wherein the positions are numbered with reference to SEQ ID NO: 414. In some embodiments, the engineered polypeptide comprises at least one substitution or one substitution set selected from P87G/N113G/E145L/E198D/M242I/I246M/W262F/A266L, P87G/P117K/L149M/M242I, P87G/E145L/L149M/E198D/C447A, P87G/L149M/M242I/R260S/A266L, P87L/P117K/M242I/R260S/A266L, P87L/L149M/R260S/W262F/A266L/C381A, P87L/E198D, P87L/M242I/I246M/R260S/W262F/A266L/C338G, P87L/N284D/C338G/C347N, N113G/P117K/D146A/L149M/R260S/W262F, N113G/P117K/A266L/C381A, N113G/P117K/C447A, N113G/E145L/D146A/L149M/M242I/C447A, N113G/M242I/C347N, N113G/M242I/C381A, P117K/E145L/D146A/W262F/N284D, P117K/E145L/L149M/N284D/C447A, P117K/L149M, P117K/E198D, P117K/E198D/W262F, P117K/M242I/I246M/R260S/A266L/N284D/C381A, P117K/M242I/R260S/W262F, P117K/I246M/R260S/W262F/C381A, P117K/I246M/N284D, P117K/A266L, E145L/D146A/L149M/R260S/W262F/C338G/C347N, E145L/D146A/M242I/R260S/W262F/C338G/C347N/C447A, E145L/L149M/E198D/R260S/A266L/C338G/C347N, E145L/L149M/R260S/A266L/C338G/C347N/C381A/C447A, D146A/L149M/R260S/W262F/C347N, L149M/E198D/I246M/R260S/A266L/C421S, E198D/C447A, M242I, M242I/I246M, M242I/I246M/C338G/C347N, M242I/R260S/W262F/C338G, M242I/C381A, I246M, R260S/W262F/C277T/N284D/C447A, R260S/A266L, W262F, C347N/C381A, and C447A, wherein the positions are numbered with reference to SEQ ID NO: 414. In some further embodiments, the engineered polypeptide comprises an amino acid sequence with at least 80% sequence identity to any even-numbered sequence set forth in SEQ ID NO: 1000 to SEQ ID NO: 1084.

[0026] The present invention also provides an engineered polypeptide comprising an amino acid sequence with at least 80%, 85%, 90%, 91%, 92%, 93%, 94%, 95%, 96%, 97%, 98%, 99% sequence identity to a reference sequence of SEQ ID NO: 414, comprising at least one substitution or one substitution set selected from 87/145/149/198/447, 87/149/260/262/266/381, 113/117/146/149/260/262, 117/145/149/284/447, 145/149/198/260/266/338/347, 146/149/260/262/347, and 149/198/246/260/266/421, wherein the positions are numbered with reference to SEQ ID NO: 414. In some embodiments, the engineered polypeptide comprises at least one substitution or one substitution set selected from 87G/145L/149M/198D/447A, 87L/149M/260S/262F/266L/381A, 113G/117K/146A/149M/260S/262F, 117K/145L/149M/284D/447A, 145L/149M/198D/260S/266L/338G/347N, 146A/149M/260S/262F/347N, and 149M/198D/246M/260S/266L/421S, wherein the positions are numbered with reference to SEQ ID NO: 414. In some further embodiments, the engineered polypeptide comprises at least one substitution or one substitution set selected from P87G/E145L/L149M/E198D/C447A, P87L/L149M/R260S/W262F/A266L/C381A, N113G/P117K/D146A/L149M/R260S/W262F, P117K/E145L/L149M/N284D/C447A, E145L/L149M/E198D/R260S/A266L/C338G/C347N, D146A/L149M/R260S/W262F/C347N, and L149M/E198D/I246M/R260S/A266L/C421S, wherein the positions are numbered with reference to SEQ ID NO: 414.

[0027] In some embodiments, the engineered monoamine oxidase polypeptide sequence comprises at least 80%, 85%, 86%, 87%, 88%, 89%, 90%, 91%, 92%, 93%, 94%, 95%, 96%, 97%, 98%, 99% sequence identity to SEQ ID NO: 6, wherein said engineered monoamine oxidase polypeptide comprises at least one substitution at one or more positions selected from 429, 149, 198, 246, 260, 266, and 421, and wherein the amino acid positions of said polypeptide sequence are numbered with reference to SEQ ID NO: 6. In some embodiments, the engineered monoamine oxidase polypeptide sequence comprises at least 80%, 85%, 86%, 87%, 88%, 89%, 90%, 91%, 92%, 93%, 94%, 95%, 96%, 97%, 98%, 99% sequence identity to SEQ ID NO: 6, wherein said engineered monoamine oxidase polypeptide comprises at least one substitution selected from 429G, 149M, 198D, 246M, 260S, 266L, and 421S, and wherein the amino acid positions of said polypeptide sequence are numbered with reference to SEQ ID NO: 6. In some embodiments, the engineered monoamine oxidase polypeptide sequence comprises at least 80%, 85%, 86%, 87%, 88%, 89%, 90%, 91%, 92%, 93%, 94%, 95%, 96%, 97%, 98%, 99% sequence identity to SEQ ID NO: 6, wherein said engineered monoamine oxidase polypeptide comprises at least one substitution selected from A429G, L149M, E198D, I246M, R260S, A266L, and C421S, wherein the amino acid positions of said polypeptide sequence are numbered with reference to SEQ ID NO: 6.

[0028] The present invention also provides an engineered polynucleotide encoding at least one engineered polypeptide described in the above paragraphs. In some embodiments, the engineered polynucleotide comprises the odd-numbered sequences set forth in SEQ ID NO: 7 to SEQ ID NO: 1083.

[0029] The present invention further provides vectors comprising at least one engineered polynucleotide described above. In some embodiments, the vectors further comprise at least one control sequence.

[0030] The present invention also provides host cells comprising the vectors provided herein. In some embodiments, the host cell produces at least one engineered polypeptide provided herein.

[0031] The present invention further provides methods of producing an engineered monoamine oxidase, comprising the steps of culturing the host cell provided herein under conditions such that the engineered polynucleotide is expressed and the engineered polypeptide is produced. In some embodiments, the methods further comprise the step of recovering the engineered polypeptide.

[0032] The present invention further provides methods of using an engineered monoamine oxidase to produce a variety of fused bicyclic proline analogues. In some embodiments, the methods further comprise steps for isolating and recovering the fused bicyclic proline analogues.

### DESCRIPTION OF THE INVENTION

[0033] Unless defined otherwise, all technical and scientific terms used herein generally have the same meaning as commonly understood by one of ordinary skill in the art to which this invention pertains. Generally, the nomenclature used herein and the laboratory procedures of cell culture, molecular genetics, microbiology, organic chemistry, analytical chemistry and nucleic acid chemistry described below are those well-known and commonly employed in the art. Such techniques are well-known and described in numerous texts and reference works well known to those of skill in the art. Standard techniques, or modifications thereof, are used for chemical syntheses and chemical analyses. All patents, patent applications, articles and publications mentioned herein, both supra and infra, are hereby expressly incorporated herein by reference.

[0034] Although any suitable methods and materials similar or equivalent to those described herein find use in the practice of the present invention, some methods and materials are described herein. It is to be understood that this invention is not limited to the particular methodology, protocols, and reagents described, as these may vary, depending upon the context they are used by those of skill in the art. Accordingly, the terms defined immediately below are more fully described by reference to the invention as a whole.

[0035] It is to be understood that both the foregoing general description and the following detailed description are exemplary and explanatory only and are not restrictive of the present invention. The section headings used herein are for organizational purposes only and not to be construed as limiting the subject matter described. Numeric ranges are inclusive of the numbers defining the range. Thus, every numerical range disclosed herein is intended to encompass every narrower numerical range that falls within such broader numerical range, as if such narrower numerical ranges were all expressly written herein. It is also intended that every maximum (or minimum) numerical limitation disclosed herein includes every lower (or higher) numerical limitation, as if such lower (or higher) numerical limitations were expressly written herein.

[0036] As used in this specification and the appended claims, the singular forms “a”, “an” and “the” include plural referents unless the context clearly indicates otherwise. Thus, for example, reference to “a polypeptide” includes more than one polypeptide. Similarly, “comprise,” “comprises,” “comprising” “include,” “includes,” and “including” are interchangeable and not intended to be limiting.

[0037] It is to be understood that where descriptions of various embodiments use the term “comprising,” those skilled in the art would understand that in some specific instances, an embodiment can be alternatively described using language “consisting essentially of” or “consisting of.” It is to be further understood that where descriptions of various embodiments use the term “optional” or “optionally” the subsequently described event or circumstance may or may not occur, and that the description includes instances where the event or circumstance occurs and instances in which it does not. It is to be understood that both the foregoing general description, and the following detailed description are exemplary and explanatory only and are not restrictive of this disclosure. The section headings used herein are for organizational purposes only and not to be construed as limiting the subject matter described.

### Abbreviations

[0038] The abbreviations used for the genetically encoded amino acids are conventional and are as follows:

| Amino Acid | Three-Letter | One-Letter Abbreviation |
|---|---|---|
| Alanine | Ala | A |
| Arginine | Arg | R |
| Asparagine | Asn | N |
| Aspartate | Asp | D |
| Cysteine | Cys | C |
| Glutamate | Glu | E |
| Glutamine | Gln | Q |
| Glycine | Gly | G |
| Histidine | His | H |
| Isoleucine | Ile | I |
| Leucine | Leu | L |
| Lysine | Lys | K |
| Methionine | Met | M |
| Phenylalanine | Phe | F |
| Proline | Pro | P |
| Serine | Ser | S |
| Threonine | Thr | T |
| Tryptophan | Trp | W |
| Tyrosine | Tyr | Y |
| Valine | Val | V |

[0039] When the three-letter abbreviations are used, unless specifically preceded by an “L” or a “D” or clear from the context in which the abbreviation is used, the amino acid may be in either the L- or D-configuration about α-carbon (C_{α}). For example, whereas “Ala” designates alanine without specifying the configuration about the α-carbon, “D-Ala” and “L-Ala” designate D-alanine and L-alanine, respectively.

[0040] When the one-letter abbreviations are used, upper case letters designate amino acids in the L-configuration about the α-carbon and lower case letters designate amino acids in the D-configuration about the α-carbon. For example, “A” designates L-alanine and “a” designates D-alanine. When polypeptide sequences are presented as a string of one-letter or three-letter abbreviations (or mixtures thereof), the sequences are presented in the amino (N) to carboxy (C) direction in accordance with common convention.

[0041] The abbreviations used for the genetically encoding nucleosides are conventional and are as follows: adenosine (A); guanosine (G); cytidine (C); thymidine (T); and uridine (U). Unless specifically delineated, the abbreviated nucleotides may be either ribonucleosides or 2′-deoxyribonucleosides. The nucleosides may be specified as being either ribonucleosides or 2′-deoxyribonucleosides on an individual basis or on an aggregate basis. When nucleic acid sequences are presented as a string of one-letter abbreviations, the sequences are presented in the 5′ to 3′ direction in accordance with common convention, and the phosphates are not indicated.

### Definitions

[0042] In reference to the present invention, the technical and scientific terms used in the descriptions herein will have the meanings commonly understood by one of ordinary skill in the art, unless specifically defined otherwise. Accordingly, the following terms are intended to have the following meanings.

[0043] “EC” number refers to the Enzyme Nomenclature of the Nomenclature Committee of the International Union of Biochemistry and Molecular Biology (NC-IUBMB). The IUBMB biochemical classification is a numerical classification system for enzymes based on the chemical reactions they catalyze.

[0044] “ATCC” refers to the American Type Culture Collection whose biorepository collection includes genes and strains.

[0045] “NCBI” refers to National Center for Biological Information and the sequence databases provided therein.

[0046] “Protein,” “polypeptide,” and “peptide” are used interchangeably herein to denote a polymer of at least two amino acids covalently linked by an amide bond, regardless of length or post-translational modification (e.g., glycosylation, phosphorylation, lipidation, myristilation, ubiquitination, etc.). Included within this definition are D- and L-amino acids, and mixtures of D- and L-amino acids, as well as polymers comprising D- and L-amino acids, and mixtures of D- and L-amino acids.

[0047] “Amino acids” are referred to herein by either their commonly known three-letter symbols or by the one-letter symbols recommended by IUPAC-IUB Biochemical Nomenclature Commission. Nucleotides, likewise, may be referred to by their commonly accepted single letter codes.

[0048] As used herein, “polynucleotide” and “nucleic acid’ refer to two or more nucleosides that are covalently linked together. The polynucleotide may be wholly comprised of ribonucleotides (i.e., RNA), wholly comprised of 2′ deoxyribonucleotides (i.e., DNA), or comprised of mixtures of ribo- and 2′ deoxyribonucleotides. While the nucleosides will typically be linked together via standard phosphodiester linkages, the polynucleotides may include one or more non-standard linkages. The polynucleotide may be single-stranded or double-stranded, or may include both single-stranded regions and double-stranded regions. Moreover, while a polynucleotide will typically be composed of the naturally occurring encoding nucleobases (i.e., adenine, guanine, uracil, thymine and cytosine), it may include one or more modified and/or synthetic nucleobases, such as, for example, inosine, xanthine, hypoxanthine, etc. In some embodiments, such modified or synthetic nucleobases are nucleobases encoding amino acid sequences.

[0049] “Monoamine oxidase” or “MAO,” as used herein, refers to a wild-type or engineered enzyme having monoamine oxidase activity (EC 1.4.3.4), natively catalyzing the oxidation of a primary amine (or sometimes a secondary or tertiary amine) to a corresponding imine. In one embodiment, the monoamine oxidase polypeptide variants catalyze the asymmetric oxidation of 6,6-dimethyl-3-azabicyclo[3.1.0]hexane to (1R,5S)-6,6-dimethyl-3-azabicyclo[3.1.0]hex-2-ene. The definition of monoamine oxidase activity is intended to be non-limiting with regard to substrates and products, and various examples of known substrates and products are presented in the present disclosure. The monoamine oxidases of the present disclosure are flavoproteins, requiring a FAD co-factor. While the monoamine oxidase enzymes of the present disclosure are derived from Aspergillus niger and Aspergillus oryzae, the present invention is not thus limited, and monoamine oxidase enzymes may be derived from any suitable organism or created synthetically. Monoamine oxidases, as used herein, include naturally occurring (wild-type) monoamine oxidases as well as non-naturally occurring engineered polypeptides generated by human manipulation.

[0050] “Coding sequence” refers to that portion of a nucleic acid (e.g., a gene) that encodes an amino acid sequence of a protein.

[0051] “Naturally-occurring” or “wild-type” refers to the form found in nature. For example, a naturally occurring or wild-type polypeptide or polynucleotide sequence is a sequence present in an organism that can be isolated from a source in nature and which has not been intentionally modified by human manipulation.

[0052] As used herein, “recombinant,” “engineered,” and “non-naturally occurring” when used with reference to a cell, nucleic acid, or polypeptide, refer to a material, or a material corresponding to the natural or native form of the material, that has been modified in a manner that would not otherwise exist in nature. In some embodiments, the cell, nucleic acid or polypeptide is identical a naturally occurring cell, nucleic acid or polypeptide, but is produced or derived from synthetic materials and/or by manipulation using recombinant techniques. Non-limiting examples include, among others, recombinant cells expressing genes that are not found within the native (non-recombinant) form of the cell or express native genes that are otherwise expressed at a different level.

[0053] “Percentage of sequence identity” and “percentage homology” are used interchangeably herein to refer to comparisons among polynucleotides or polypeptides, and are determined by comparing two optimally aligned sequences over a comparison window, wherein the portion of the polynucleotide or polypeptide sequence in the comparison window may comprise additions or deletions (i.e., gaps) as compared to the reference sequence for optimal alignment of the two sequences. The percentage may be calculated by determining the number of positions at which the identical nucleic acid base or amino acid residue occurs in both sequences to yield the number of matched positions, dividing the number of matched positions by the total number of positions in the window of comparison and multiplying the result by 100 to yield the percentage of sequence identity. Alternatively, the percentage may be calculated by determining the number of positions at which either the identical nucleic acid base or amino acid residue occurs in both sequences or a nucleic acid base or amino acid residue is aligned with a gap to yield the number of matched positions, dividing the number of matched positions by the total number of positions in the window of comparison and multiplying the result by 100 to yield the percentage of sequence identity. Those of skill in the art appreciate that there are many established algorithms available to align two sequences. Optimal alignment of sequences for comparison can be conducted, e.g., by the local homology algorithm of Smith and Waterman (Smith and Waterman, Adv. Appl. Math., 2:482 [1981]), by the homology alignment algorithm of Needleman and Wunsch (Needleman and Wunsch, J. Mol. Biol., 48:443 [1970]), by the search for similarity method of Pearson and Lipman (Pearson and Lipman, Proc. Natl. Acad. Sci. USA 85:2444 [1988]), by computerized implementations of these algorithms (e.g., GAP, BESTFIT, FASTA, and TFASTA in the GCG Wisconsin Software Package), or by visual inspection, as known in the art. Examples of algorithms that are suitable for determining percent sequence identity and sequence similarity include, but are not limited to the BLAST and BLAST 2.0 algorithms, which are described by Altschul et al. (See, Altschul et al., J. Mol. Biol., 215: 403-410 [1990]; and Altschul et al., Nucl. Acids Res., 3389-3402 [1977], respectively). Software for performing BLAST analyses is publicly available through the National Center for Biotechnology Information website. This algorithm involves first identifying high scoring sequence pairs (HSPs) by identifying short words of length W in the query sequence, which either match or satisfy some positive-valued threshold score T when aligned with a word of the same length in a database sequence. T is referred to as, the neighborhood word score threshold (Altschul et al., supra). These initial neighborhood word hits act as seeds for initiating searches to find longer HSPs containing them. The word hits are then extended in both directions along each sequence for as far as the cumulative alignment score can be increased. Cumulative scores are calculated using, for nucleotide sequences, the parameters M (reward score for a pair of matching residues; always >0) and N (penalty score for mismatching residues; always <0). For amino acid sequences, a scoring matrix is used to calculate the cumulative score. Extension of the word hits in each direction are halted when: the cumulative alignment score falls off by the quantity X from its maximum achieved value; the cumulative score goes to zero or below, due to the accumulation of one or more negative-scoring residue alignments; or the end of either sequence is reached. The BLAST algorithm parameters W, T, and X determine the sensitivity and speed of the alignment. The BLASTN program (for nucleotide sequences) uses as defaults a wordlength (W) of 11, an expectation (E) of 10, M=5, N=−4, and a comparison of both strands. For amino acid sequences, the BLASTP program uses as defaults a wordlength (W) of 3, an expectation (E) of 10, and the BLOSUM62 scoring matrix (See, Henikoff and Henikoff, Proc. Natl. Acad. Sci. USA 89:10915 [1989]). Exemplary determination of sequence alignment and % sequence identity can employ the BESTFIT or GAP programs in the GCG Wisconsin Software package (Accelrys, Madison WI), using default parameters provided.

[0054] “Reference sequence” refers to a defined sequence used as a basis for a sequence comparison. A reference sequence may be a subset of a larger sequence, for example, a segment of a full-length gene or polypeptide sequence. Generally, a reference sequence is at least 20 nucleotide or amino acid residues in length, at least 25 residues in length, at least 50 residues in length, or the full length of the nucleic acid or polypeptide. Since two polynucleotides or polypeptides may each (1) comprise a sequence (i.e., a portion of the complete sequence) that is similar between the two sequences, and (2) may further comprise a sequence that is divergent between the two sequences, sequence comparisons between two (or more) polynucleotides or polypeptide are typically performed by comparing sequences of the two polynucleotides or polypeptides over a “comparison window” to identify and compare local regions of sequence similarity. In some embodiments, a “reference sequence” can be based on a primary amino acid sequence, where the reference sequence is a sequence that can have one or more changes in the primary sequence. For instance, a “reference sequence based on SEQ ID NO:4 having at the residue corresponding to X14 a valine” or X14V refers to a reference sequence in which the corresponding residue at X14 in SEQ ID NO:4, which is a tyrosine, has been changed to valine.

[0055] “Comparison window” refers to a conceptual segment of at least about 20 contiguous nucleotide positions or amino acids residues wherein a sequence may be compared to a reference sequence of at least 20 contiguous nucleotides or amino acids and wherein the portion of the sequence in the comparison window may comprise additions or deletions (i.e., gaps) of 20 percent or less as compared to the reference sequence (which does not comprise additions or deletions) for optimal alignment of the two sequences. The comparison window can be longer than 20 contiguous residues, and includes, optionally 30, 40, 50, 100, or longer windows.

[0056] As used herein, “substantial identity” refers to a polynucleotide or polypeptide sequence that has at least 80 percent sequence identity, at least 85 percent identity, at least between 89 to 95 percent sequence identity, or more usually, at least 99 percent sequence identity as compared to a reference sequence over a comparison window of at least 20 residue positions, frequently over a window of at least 30-50 residues, wherein the percentage of sequence identity is calculated by comparing the reference sequence to a sequence that includes deletions or additions which total 20 percent or less of the reference sequence over the window of comparison. In some specific embodiments applied to polypeptides, the term “substantial identity” means that two polypeptide sequences, when optimally aligned, such as by the programs GAP or BESTFIT using default gap weights, share at least 80 percent sequence identity, preferably at least 89 percent sequence identity, at least 95 percent sequence identity or more (e.g., 99 percent sequence identity). In some embodiments, residue positions that are not identical in sequences being compared differ by conservative amino acid substitutions.

[0057] “Corresponding to,” “reference to,” and “relative to” when used in the context of the numbering of a given amino acid or polynucleotide sequence refer to the numbering of the residues of a specified reference sequence when the given amino acid or polynucleotide sequence is compared to the reference sequence. In other words, the residue number or residue position of a given polymer is designated with respect to the reference sequence rather than by the actual numerical position of the residue within the given amino acid or polynucleotide sequence. For example, a given amino acid sequence, such as that of an engineered monoamine oxidase, can be aligned to a reference sequence by introducing gaps to optimize residue matches between the two sequences. In these cases, although the gaps are present, the numbering of the residue in the given amino acid or polynucleotide sequence is made with respect to the reference sequence to which it has been aligned.

[0058] “Amino acid difference” or “residue difference” refers to a change in the amino acid residue at a position of a polypeptide sequence relative to the amino acid residue at a corresponding position in a reference sequence. The positions of amino acid differences generally are referred to herein as “Xn,” where n refers to the corresponding position in the reference sequence upon which the residue difference is based. For example, a “residue difference at position X25 as compared to SEQ ID NO: 2” refers to a change of the amino acid residue at the polypeptide position corresponding to position 25 of SEQ ID NO: 2. Thus, if the reference polypeptide of SEQ ID NO: 2 has a valine at position 25, then a “residue difference at position X25 as compared to SEQ ID NO: 2” an amino acid substitution of any residue other than valine at the position of the polypeptide corresponding to position 25 of SEQ ID NO: 2. In most instances herein, the specific amino acid residue difference at a position is indicated as “XnY” where “Xn” specified the corresponding position as described above, and “Y” is the single letter identifier of the amino acid found in the engineered polypeptide (i.e., the different residue than in the reference polypeptide). In some embodiments, more than one amino acid can appear in a specified residue position (i.e., the alternative amino acids can be listed in the form XnY/Z, where Y and Z represent alternate amino acid residues). In some instances (e.g., in Tables 4.2, 5.1, 6.1, 7.1, 8.1, and 9.1) the present invention also provides specific amino acid differences denoted by the conventional notation “AnB”, where A is the single letter identifier of the residue in the reference sequence, “n” is the number of the residue position in the reference sequence, and B is the single letter identifier of the residue substitution in the sequence of the engineered polypeptide. Furthermore, in some instances, a polypeptide of the present invention can include one or more amino acid residue differences relative to a reference sequence, which is indicated by a list of the specified positions where changes are made relative to the reference sequence. In some additional embodiments, the present invention provides engineered polypeptide sequences comprising both conservative and non-conservative amino acid substitutions.

[0059] As used herein, “conservative amino acid substitution” refers to a substitution of a residue with a different residue having a similar side chain, and thus typically involves substitution of the amino acid in the polypeptide with amino acids within the same or similar defined class of amino acids. By way of example and not limitation, an amino acid with an aliphatic side chain is substituted with another aliphatic amino acid (e.g., alanine, valine, leucine, and isoleucine); an amino acid with an hydroxyl side chain is substituted with another amino acid with a hydroxyl side chain (e.g., serine and threonine); an amino acid having an aromatic side chain is substituted with another amino acid having an aromatic side chain (e.g., phenylalanine, tyrosine, tryptophan, and histidine); an amino acid with a basic side chain is substituted with another amino acid with a basic side chain (e.g., lysine and arginine); an amino acid with an acidic side chain is substituted with another amino acid with an acidic side chain (e.g., aspartic acid or glutamic acid); and/or a hydrophobic or hydrophilic amino acid is replaced with another hydrophobic or hydrophilic amino acid, respectively. Exemplary conservative substitutions are provided in Table 1 below.

TABLE 1
Conservative Amino Acid Substitution Examples

| Residue | Possible Conservative Substitutions |
|---|---|
| A, L, V, I | Other aliphatic (A, L, V, I) |
| | Other non-polar (A, L, V, I, G, M) |
| G, M | Other non-polar (A, L, V, I, G, M) |
| D, E | Other acidic (D, E) |
| K, R | Other basic (K, R) |
| N, Q, S, T | Other polar |
| H, Y, W, F | Other aromatic (H, Y, W, F) |
| C, P | None |

[0060] “Non-conservative substitution” refers to substitution of an amino acid in the polypeptide with an amino acid with significantly differing side chain properties. Non-conservative substitutions may use amino acids between, rather than within, the defined groups and affects (a) the structure of the peptide backbone in the area of the substitution (e.g., proline for glycine), (b) the charge or hydrophobicity, or (c) the bulk of the side chain. By way of example and not limitation, an exemplary non-conservative substitution can be an acidic amino acid substituted with a basic or aliphatic amino acid; an aromatic amino acid substituted with a small amino acid; and a hydrophilic amino acid substituted with a hydrophobic amino acid.

[0061] “Deletion” refers to modification to the polypeptide by removal of one or more amino acids from the reference polypeptide. Deletions can comprise removal of 1 or more amino acids, 2 or more amino acids, 5 or more amino acids, 10 or more amino acids, 15 or more amino acids, or 20 or more amino acids, up to 10% of the total number of amino acids, or up to 20% of the total number of amino acids making up the reference enzyme while retaining enzymatic activity and/or retaining the improved properties of an engineered monoamine oxidase enzyme. Deletions can be directed to the internal portions and/or terminal portions of the polypeptide. In various embodiments, the deletion can comprise a continuous segment or can be discontinuous.

[0062] “Insertion” refers to modification to the polypeptide by addition of one or more amino acids from the reference polypeptide. In some embodiments, the improved engineered monoamine oxidase enzymes comprise insertions of one or more amino acids to the naturally occurring monoamine oxidase polypeptide as well as insertions of one or more amino acids to other improved monoamine oxidase polypeptides. Insertions can be in the internal portions of the polypeptide, or to the carboxy or amino terminus. Insertions as used herein include fusion proteins as is known in the art. The insertion can be a contiguous segment of amino acids or separated by one or more of the amino acids in the naturally occurring polypeptide.

[0063] “Fragment” as used herein refers to a polypeptide that has an amino-terminal and/or carboxy-terminal deletion, but where the remaining amino acid sequence is identical to the corresponding positions in the sequence. Fragments can be at least 14 amino acids long, at least 20 amino acids long, at least 50 amino acids long or longer, and up to 70%, 80%, 90%, 95%, 98%, and 99% of the full-length monoamine oxidase polypeptide, for example the polypeptide of SEQ ID NO: 6 or an engineered monoamine oxidase provided in the even-numbered sequences of SEQ ID NOs: 6-1084.

[0064] “Isolated polypeptide” refers to a polypeptide which is substantially separated from other contaminants that naturally accompany it, e.g., protein, lipids, and polynucleotides. The term embraces polypeptides which have been removed or purified from their naturally-occurring environment or expression system (e.g., host cell or in vitro synthesis). The engineered monoamine oxidase enzymes may be present within a cell, present in the cellular medium, or prepared in various forms, such as lysates or isolated preparations. As such, in some embodiments, the engineered monoamine oxidase enzyme can be an isolated polypeptide.

[0065] “Substantially pure polypeptide” refers to a composition in which the polypeptide species is the predominant species present (i.e., on a molar or weight basis it is more abundant than any other individual macromolecular species in the composition), and is generally a substantially purified composition when the object species comprises at least about 50 percent of the macromolecular species present by mole or % weight. Generally, a substantially pure monoamine oxidase composition will comprise about 60% or more, about 70% or more, about 80% or more, about 90% or more, about 95% or more, and about 98% or more of all macromolecular species by mole or % weight present in the composition. In some embodiments, the object species is purified to essential homogeneity (i.e., contaminant species cannot be detected in the composition by conventional detection methods) wherein the composition consists essentially of a single macromolecular species. Solvent species, small molecules (<500 Daltons), and elemental ion species are not considered macromolecular species. In some embodiments, the isolated engineered monoamine oxidase polypeptide is a substantially pure polypeptide composition.

[0066] “Stereoselective” refers to a preference for formation of one stereoisomer over another in a chemical or enzymatic reaction. Stereoselectivity can be partial, where the formation of one stereoisomer is favored over the other, or it may be complete where only one stereoisomer is formed. When the stereoisomers are enantiomers, the stereoselectivity is referred to as enantioselectivity, the fraction (typically reported as a percentage) of one enantiomer in the sum of both. It is commonly alternatively reported in the art (typically as a percentage) as the enantiomeric excess (e.e.) calculated therefrom according to the formula [major enantiomer−minor enantiomer]/[major enantiomer+minor enantiomer]. Where the stereoisomers are diastereoisomers, the stereoselectivity is referred to as diastereoselectivity, the fraction (typically reported as a percentage) of one diastereomer in a mixture of two diastereomers, commonly alternatively reported as the diastereomeric excess (d.e.). Enantiomeric excess and diastereomeric excess are types of stereomeric excess.

[0067] “Highly stereoselective” refers to a chemical or enzymatic reaction that is capable of converting a substrate or substrates (e.g., substrate compound 6,6-dimethyl-3-azabicyclo[3.1.0]hexane), to the corresponding imine product (e.g., to (1R,5S)-6,6-dimethyl-3-azabicyclo[3.1.0]hex-2-ene), with at least about 85% stereomeric excess.

[0068] As used herein, “improved enzyme property” refers to at least one improved property of an enzyme. In some embodiments, the present invention provides engineered monoamine oxidase polypeptides that exhibit an improvement in any enzyme property as compared to a reference monoamine oxidase polypeptide or another engineered monoamine oxidase. For the engineered monoamine oxidase polypeptides described herein, the comparison is generally made to the parent enzyme from which the monoamine oxidase is derived, although in some embodiments, the reference enzyme can be another improved engineered monoamine oxidase. Thus, the level of “improvement” can be determined and compared between various monoamine oxidase polypeptides, including wild-type, as well as engineered monoamine oxidases. Improved properties include, but are not limited, to such properties as enzymatic activity (which can be expressed in terms of percent conversion of the substrate), thermo stability, solvent stability, pH activity profile, cofactor requirements, refractoriness to inhibitors (e.g., substrate or product inhibition), stereospecificity, and/or stereoselectivity (including enantioselectivity).

[0069] “Increased enzymatic activity” refers to an improved property of the engineered monoamine oxidase polypeptides, which can be represented by an increase in specific activity (e.g., product produced/time/weight protein) or an increase in percent conversion of the substrate to the product (e.g., percent conversion of starting amount of substrate to product in a specified time period using a specified amount of monoamine oxidase) as compared to the reference monoamine oxidase enzyme. Exemplary methods to determine enzyme activity are provided in the Examples. Any property relating to enzyme activity may be affected, including the classical enzyme properties of Kₘ, Vₘₐₓ or k_{cat}, changes of which can lead to increased enzymatic activity. Improvements in enzyme activity can be from about 1.2 times the enzymatic activity of the corresponding parent enzyme, to as much as 2 times, 5 times, 10 times, 20 times, 25 times, 50 times or more enzymatic activity than the naturally occurring or another engineered monoamine oxidase from which the monoamine oxidase polypeptides were derived. Monoamine oxidase activity can be measured by any one of standard assays, such as by monitoring changes in properties of substrates, cofactors, or products. In some embodiments, the amount of products generated can be measured by Liquid Chromatography-Mass Spectrometry (LC-MS). Comparisons of enzyme activities are made using a defined preparation of enzyme, a defined assay under a set condition, and one or more defined substrates, as further described in detail herein. Generally, when lysates are compared, the numbers of cells and the amount of protein assayed are determined as well as use of identical expression systems and identical host cells to minimize variations in amount of enzyme produced by the host cells and present in the lysates.

[0070] “Conversion” refers to the enzymatic conversion of the substrate(s) to the corresponding product(s). “Percent conversion” refers to the percent of the substrate that is converted to the product within a period of time under specified conditions. Thus, the “enzymatic activity” or “activity” of a monoamine oxidase polypeptide can be expressed as “percent conversion” of the substrate to the product.

[0071] “Thermostable” refers to a monoamine oxidase polypeptide that maintains similar activity (more than 60% to 80% for example) after exposure to elevated temperatures (e.g., 40-80° C.) for a period of time (e.g., 0.5-24 hrs) compared to the parent enzyme exposed to the same elevated temperature.

[0072] “Solvent stable” refers to a monoamine oxidase polypeptide that maintains similar activity (more than e.g., 60% to 80%) after exposure to varying concentrations (e.g., 5-99%) of solvent (ethanol, isopropyl alcohol, dimethylsulfoxide (DMSO), tetrahydrofuran, 2-methyltetrahydrofuran, acetone, toluene, butyl acetate, methyl tert-butyl ether, etc.) for a period of time (e.g., 0.5-24 hrs) compared to the parent enzyme exposed to the same concentration of the same solvent.

[0073] “Thermo- and solvent stable” refers to a monoamine oxidase polypeptide that is both thermostable and solvent stable.

[0074] The term “stringent hybridization conditions” is used herein to refer to conditions under which nucleic acid hybrids are stable. As known to those of skill in the art, the stability of hybrids is reflected in the melting temperature (Tm) of the hybrids. In general, the stability of a hybrid is a function of ion strength, temperature, G/C content, and the presence of chaotropic agents. The Tm values for polynucleotides can be calculated using known methods for predicting melting temperatures (See e.g., Baldino et al., Meth. Enzymol., 168:761-777 [1989]; Bolton et al., Proc. Natl. Acad. Sci. USA 48:1390 [1962]; Bresslauer et al., Proc. Natl. Acad. Sci. USA 83:8893-8897 [1986]; Freier et al., Proc. Natl. Acad. Sci. USA 83:9373-9377 [1986]; Kierzek et al., Biochem., 25:7840-7846 [1986]; Rychlik et al., 1990, Nucl. Acids Res., 18:6409-6412 [1990] (erratum, Nucl. Acids Res., 19:698 [1991]); Sambrook et al., supra); Suggs et al., 1981, in Developmental Biology Using Purified Genes, Brown et al. [eds.], pp. 683-693, Academic Press, Cambridge, MA [1981]; and Wetmur, Crit. Rev. Biochem. Mol. Biol., 26:227-259 [1991]). In some embodiments, the polynucleotide encodes the polypeptide disclosed herein and hybridizes under defined conditions, such as moderately stringent or highly stringent conditions, to the complement of a sequence encoding an engineered monoamine oxidase enzyme of the present invention.

[0075] “Hybridization stringency” relates to hybridization conditions, such as washing conditions, in the hybridization of nucleic acids. Generally, hybridization reactions are performed under conditions of lower stringency, followed by washes of varying but higher stringency. The term “moderately stringent hybridization” refers to conditions that permit target-DNA to bind a complementary nucleic acid that has about 60% identity, preferably about 75% identity, about 85% identity to the target DNA, with greater than about 90% identity to target-polynucleotide. Exemplary moderately stringent conditions are conditions equivalent to hybridization in 50% formamide, 5×Denhart's solution, 5×SSPE, 0.2% SDS at 42° C., followed by washing in 0.2×SSPE, 0.2% SDS, at 42° C. “High stringency hybridization” refers generally to conditions that are about 10° C. or less from the thermal melting temperature Tm as determined under the solution condition for a defined polynucleotide sequence. In some embodiments, a high stringency condition refers to conditions that permit hybridization of only those nucleic acid sequences that form stable hybrids in 0.018 M NaCl at 65° C. (i.e., if a hybrid is not stable in 0.018 M NaCl at 65° C., it will not be stable under high stringency conditions, as contemplated herein). High stringency conditions can be provided, for example, by hybridization in conditions equivalent to 50% formamide, 5×Denhart's solution, 5×SSPE, 0.2% SDS at 42° C., followed by washing in 0.1×SSPE, and 0.1% SDS at 65° C. Another high stringency condition is hybridizing in conditions equivalent to hybridizing in 5×SSC containing 0.1% (w:v) SDS at 65° C. and washing in 0.1×SSC containing 0.1% SDS at 65° C. Other high stringency hybridization conditions, as well as moderately stringent conditions, are described in the references cited above.

[0076] “Heterologous” polynucleotide refers to any polynucleotide that is introduced into a host cell by laboratory techniques, and includes polynucleotides that are removed from a host cell, subjected to laboratory manipulation, and then reintroduced into a host cell.

[0077] “Codon optimized” refers to changes in the codons of the polynucleotide encoding a protein to those preferentially used in a particular organism such that the encoded protein is efficiently expressed in the organism of interest. Although the genetic code is degenerate in that most amino acids are represented by several codons, called “synonyms” or “synonymous” codons, it is well known that codon usage by particular organisms is nonrandom and biased towards particular codon triplets. This codon usage bias may be higher in reference to a given gene, genes of common function or ancestral origin, highly expressed proteins versus low copy number proteins, and the aggregate protein coding regions of an organism's genome. In some embodiments, the polynucleotides encoding the monoamine oxidase enzymes may be codon optimized for optimal production from the host organism selected for expression.

[0078] As used herein, “preferred, optimal, high codon usage bias codons” refers interchangeably to codons that are used at higher frequency in the protein coding regions than other codons that code for the same amino acid. The preferred codons may be determined in relation to codon usage in a single gene, a set of genes of common function or origin, highly expressed genes, the codon frequency in the aggregate protein coding regions of the whole organism, codon frequency in the aggregate protein coding regions of related organisms, or combinations thereof. Codons whose frequency increases with the level of gene expression are typically optimal codons for expression. A variety of methods are known for determining the codon frequency (e.g., codon usage, relative synonymous codon usage) and codon preference in specific organisms, including multivariate analysis, for example, using cluster analysis or correspondence analysis, and the effective number of codons used in a gene (See e.g., GCG CodonPreference, Genetics Computer Group Wisconsin Package; CodonW, Peden, University of Nottingham; McInerney, Bioinform., 14:372-73 [1998]; Stenico et al., Nucl. Acids Res., 222437-46 [1994]; Wright, Gene 87:23-29 [1990]). Codon usage tables are available for many different organisms (See e.g., Wada et al., Nucl. Acids Res., 20:2111-2118 [1992]; Nakamura et al., Nucl. Acids Res., 28:292 [2000]; Duret, et al., supra; Henaut and Danchin, in Escherichia coli and Salmonella, Neidhardt, et al. (eds.), ASM Press, Washington D.C., p. 2047-2066 [1996]). The data source for obtaining codon usage may rely on any available nucleotide sequence capable of coding for a protein. These data sets include nucleic acid sequences actually known to encode expressed proteins (e.g., complete protein coding sequences-CDS), expressed sequence tags (ESTS), or predicted coding regions of genomic sequences (See e.g., Mount, Bioinformatics: Sequence and Genome Analysis, Chapter 8, Cold Spring Harbor Laboratory Press, Cold Spring Harbor, N.Y. [2001]; Uberbacher, Meth. Enzymol., 266:259-281 [1996]; and Tiwari et al., Comput. Appl. Biosci., 13:263-270 [1997]).

[0079] “Control sequence” is defined herein to include all components, which are necessary or advantageous for the expression of a polynucleotide and/or polypeptide of the present invention. Each control sequence may be native or foreign to the nucleic acid sequence encoding the polypeptide. Such control sequences include, but are not limited to, a leader, polyadenylation sequence, propeptide sequence, promoter, signal peptide sequence, and transcription terminator. At a minimum, the control sequences include a promoter, and transcriptional and translational stop signals. The control sequences may be provided with linkers for the purpose of introducing specific restriction sites facilitating ligation of the control sequences with the coding region of the nucleic acid sequence encoding a polypeptide.

[0080] “Operably linked” is defined herein as a configuration in which a control sequence is appropriately placed (i.e., in a functional relationship) at a position relative to a polynucleotide of interest such that the control sequence directs or regulates the expression of the polynucleotide and/or polypeptide of interest.

[0081] “Promoter sequence” refers to a nucleic acid sequence that is recognized by a host cell for expression of a polynucleotide of interest, such as a coding sequence. The promoter sequence contains transcriptional control sequences, which mediate the expression of a polynucleotide of interest. The promoter may be any nucleic acid sequence which shows transcriptional activity in the host cell of choice including mutant, truncated, and hybrid promoters, and may be obtained from genes encoding extracellular or intracellular polypeptides either homologous or heterologous to the host cell.

[0082] “Suitable reaction conditions” refer to those conditions in the biocatalytic reaction solution (e.g., ranges of enzyme loading, substrate loading, cofactor loading, temperature, pH, buffers, co-solvents, etc.) under which monoamine oxidase polypeptide of the present invention is capable of converting one or more substrate compounds to a product compound (e.g., conversion of compounds of Formula I to compounds of Formula II, as shown in Scheme 1). Exemplary “suitable reaction conditions” are provided in the present invention and illustrated by the Examples.

[0083] “Composition” refers to a mixture or combination of one or more substances, wherein each substance or component of the composition retains its individual properties. As used herein, a biocatalytic composition refers to a combination of one or more substances useful for biocatalysis.

[0084] “Loading”, such as in “compound loading” or “enzyme loading” or “cofactor loading” refers to the concentration or amount of a component in a reaction mixture at the start of the reaction.

[0085] “Substrate” in the context of a biocatalyst mediated process refers to the compound or molecule acted on by the biocatalyst. For example, 6,6-dimethyl-3-azabicyclo[3.1.0]hexane is a substrate for a monoamine oxidase.

[0086] “Product” in the context of a biocatalyst mediated process refers to the compound or molecule resulting from the action of the biocatalyst. For example, (1R,5S)-6,6-dimethyl-3-azabicyclo[3.1.0]hex-2-ene is a product of the monoamine oxidase-mediated conversion of 6,6-dimethyl-3-azabicyclo[3.1.0]hexane).

[0087] “Alkyl” refers to saturated hydrocarbon groups of from 1 to 18 carbon atoms inclusively, either straight chained or branched, more preferably from 1 to 8 carbon atoms inclusively, and most preferably 1 to 6 carbon atoms inclusively. An alkyl with a specified number of carbon atoms is denoted in parenthesis (e.g., (C₁-C₆)alkyl refers to an alkyl of 1 to 6 carbon atoms).

[0088] “Alkenyl” refers to hydrocarbon groups of from 2 to 12 carbon atoms inclusively, either straight or branched containing at least one double bond but optionally containing more than one double bond.

[0089] “Alkynyl” refers to hydrocarbon groups of from 2 to 12 carbon atoms inclusively, either straight or branched containing at least one triple bond but optionally containing more than one triple bond, and

[0090] “Heteroalkyl, “heteroalkenyl,” and heteroalkynyl,” refer respectively, to alkyl, alkenyl and alkynyl as defined herein in which one or more of the carbon atoms are each independently replaced with the same or different heteroatoms or heteroatomic groups. Heteroatoms and/or heteroatomic groups which can replace the carbon atoms include, but are not limited to, —O—, —S—, —S—O—, —NRα—, —PH—, —S(O)—, —S(O)2-, —S(O) NRα-, —S(O)2NRα-, and the like, including combinations thereof, where each Ra is independently selected from hydrogen, alkyl, cycloalkyl, heterocycloalkyl, aryl, and heteroaryl.

[0091] “Aryl” refers to an unsaturated aromatic carbocyclic group of from 6 to 12 carbon atoms inclusively having a single ring (e.g., phenyl) or multiple condensed rings (e.g., naphthyl or anthryl). Exemplary aryls include phenyl, pyridyl, naphthyl and the like.

[0092] “Arylalkyl” refers to an alkyl substituted with an aryl (i.e., aryl-alkyl-groups), preferably having from 1 to 6 carbon atoms inclusively in the alkyl moiety and from 6 to 12 carbon atoms inclusively in the aryl moiety. Such arylalkyl groups are exemplified by benzyl, phenethyl and the like.

[0093] “Cycloalkyl” refers to cyclic alkyl groups of from 3 to 12 carbon atoms inclusively having a single cyclic ring or multiple condensed rings which can be optionally substituted with from 1 to 3 alkyl groups. Exemplary cycloalkyl groups include, but are not limited to, single ring structures such as cyclopropyl, cyclobutyl, cyclopentyl, cyclooctyl, 1-methylcyclopropyl, 2-methylcyclopentyl, 2-methylcyclooctyl, and the like, or multiple ring structures, including bridged ring systems, such as adamantyl, and the like.

[0094] “Cycloalkylalkyl” refers to an alkyl substituted with a cycloalkyl (i.e., cycloalkyl-alkyl-groups), preferably having from 1 to 6 carbon atoms inclusively in the alkyl moiety and from 3 to 12 carbon atoms inclusively in the cycloalkyl moiety. Such cycloalkylalkyl groups are exemplified by cyclopropylmethyl, cyclohexylethyl and the like.

[0095] “Amino” refers to the group —NH2. Substituted amino refers to the group —NHRδ, NRδRδ, and NRδRδRδ, where each Rδ is independently selected from substituted or unsubstituted alkyl, cycloalkyl, cycloheteroalkyl, alkoxy, aryl, heteroaryl, heteroarylalkyl, acyl, alkoxycarbonyl, sulfanyl, sulfinyl, sulfonyl, and the like. Typical amino groups include, but are limited to, dimethylamino, diethylamino, trimethylammonium, triethylammonium, methylysulfonylamino, furanyl-oxy-sulfamino, and the like.

[0096] “Aminoalkyl” refers to an alkyl group in which one or more of the hydrogen atoms are replaced with one or more amino groups, including substituted amino groups.

[0097] “Aminocarbonyl” refers to —C(O)NH₂. Substituted aminocarbonyl refers to —C(O)NRδRδ, where the amino group NRδRδ is as defined herein.

[0098] “Oxy” refers to a divalent group —O—, which may have various substituents to form different oxy groups, including ethers and esters.

[0099] “Alkoxy” or “alkyloxy” are used interchangeably herein to refer to the group —ORβ wherein Rβ is an alkyl group, including optionally substituted alkyl groups.

[0100] “Carboxy” refers to —COOH.

[0101] “Carbonyl” refers to —C(O)—, which may have a variety of substituents to form different carbonyl groups including acids, acid halides, aldehydes, amides, esters, and ketones.

[0102] “Halogen” or “halo” refers to fluoro, chloro, bromo and iodo.

[0103] “Haloalkyl” refers to an alkyl group in which one or more of the hydrogen atoms are replaced with a halogen. Thus, the term “haloalkyl” is meant to include monohaloalkyls, dihaloalkyls, trihaloalkyls, etc. up to perhaloalkyls. For example, the expression “(C₁-C₂) haloalkyl” includes 1-fluoromethyl, difluoromethyl, trifluoromethyl, 1-fluoroethyl, 1,1-difluoroethyl, 1,2-difluoroethyl, 1,1,1 trifluoroethyl, perfluoroethyl, etc.

[0104] “Hydroxy” refers to —OH.

[0105] “Hydroxyalkyl” refers to an alkyl group in which in which one or more of the hydrogen atoms are replaced with one or more hydroxy groups.

[0106] “Thiol” or “sulfanyl” refers to —SH. Substituted thiol or sulfanyl refers to —S—R^{η}, where R^{η} is an alkyl, aryl or other suitable substituent.

[0107] “Alkylthio” refers to —SR^{ζ}, where R^{ζ} is an alkyl, which can be optionally substituted. Typical alkylthio group include, but are not limited to, methylthio, ethylthio, n-propylthio, and the like.

[0108] “Alkylthioalkyl” refers to an alkyl substituted with an alkylthio group, —SR^{ζ}, where R^{ζ} is an alkyl, which can be optionally substituted.

[0109] “Sulfonyl” refers to —SO₂—. Substituted sulfonyl refers to —SO₂—R^{η}, where R^{η} is an alkyl, aryl or other suitable substituent.

[0110] “Alkylsulfonyl” refers to —SO₂—R^{ζ}, where R^{ζ} is an alkyl, which can be optionally substituted.

[0111] Typical alkylsulfonyl groups include, but are not limited to, methylsulfonyl, ethylsulfonyl, n-propylsulfonyl, and the like.

[0112] “Alkylsulfonylalkyl” refers to an alkyl substituted with an alkylsulfonyl group, —SO₂—R^{ζ}, where R^{ζ} is an alkyl, which can be optionally substituted.

[0113] “Heteroaryl” refers to an aromatic heterocyclic group of from 1 to 10 carbon atoms inclusively and 1 to 4 heteroatoms inclusively selected from oxygen, nitrogen and sulfur within the ring. Such heteroaryl groups can have a single ring (e.g., pyridyl or furyl) or multiple condensed rings (e.g., indolizinyl or benzothienyl).

[0114] “Heteroarylalkyl” refers to an alkyl substituted with a heteroaryl (i.e., heteroaryl-alkyl-groups), preferably having from 1 to 6 carbon atoms inclusively in the alkyl moiety and from 5 to 12 ring atoms inclusively in the heteroaryl moiety. Such heteroarylalkyl groups are exemplified by pyridylmethyl and the like.

[0115] “Heterocycle”, “heterocyclic” and interchangeably “heterocycloalkyl” refer to a saturated or unsaturated group having a single ring or multiple condensed rings, from 2 to 10 carbon ring atoms inclusively and from 1 to 4 hetero ring atoms inclusively selected from nitrogen, sulfur or oxygen within the ring. Such heterocyclic groups can have a single ring (e.g., piperidinyl or tetrahydrofuryl) or multiple condensed rings (e.g., indolinyl, dihydrobenzofuran or quinuclidinyl). Examples of heterocycles include, but are not limited to, furan, thiophene, thiazole, oxazole, pyrrole, imidazole, pyrazole, pyridine, pyrazine, pyrimidine, pyridazine, indolizine, isoindole, indole, indazole, purine, quinolizine, isoquinoline, quinoline, phthalazine, naphthylpyridine, quinoxaline, quinazoline, cinnoline, pteridine, carbazole, carboline, phenanthridine, acridine, phenanthroline, isothiazole, phenazine, isoxazole, phenoxazine, phenothiazine, imidazolidine, imidazoline, piperidine, piperazine, pyrrolidine, indoline and the like.

[0116] “Membered ring” is meant to embrace any cyclic structure. The number preceding the term “membered” denotes the number of skeletal atoms that constitute the ring. Thus, for example, cyclohexyl, pyridine, pyran and thiopyran are 6-membered rings and cyclopentyl, pyrrole, furan, and thiophene are 5-membered rings.

[0117] “Fused bicyclic ring” as used herein refers to both unsubstituted and substituted carbocyclic and/or heterocyclic ring moieties having 3 to 8 atoms in each ring, the rings having 2 common atoms.

[0118] “Optionally substituted” as used herein with respect to the foregoing chemical groups means that positions of the chemical group occupied by hydrogen can be substituted with another atom (unless otherwise specified) exemplified by, but not limited to carbon, oxygen, nitrogen, or sulfur, or a chemical group, exemplified by, but not limited to, hydroxy, oxo, nitro, methoxy, ethoxy, alkoxy, substituted alkoxy, trifluoromethoxy, haloalkoxy, fluoro, chloro, bromo, iodo, halo, methyl, ethyl, propyl, butyl, alkyl, alkenyl, alkynyl, substituted alkyl, trifluoromethyl, haloalkyl, hydroxyalkyl, alkoxyalkyl, thio, alkylthio, acyl, carboxy, alkoxycarbonyl, carboxamido, substituted carboxamido, alkylsulfonyl, alkylsulfinyl, alkylsulfonylamino, sulfonamido, substituted sulfonamido, cyano, amino, substituted amino, alkylamino, dialkylamino, aminoalkyl, acylamino, amidino, amidoximo, hydroxamoyl, phenyl, aryl, substituted aryl, aryloxy, arylalkyl, arylalkenyl, arylalkynyl, pyridyl, imidazolyl, heteroaryl, substituted heteroaryl, heteroaryloxy, heteroarylalkyl, heteroarylalkenyl, heteroarylalkynyl, cyclopropyl, cyclobutyl, cyclopentyl, cyclohexyl, cycloalkyl, cycloalkenyl, cycloalkylalkyl, substituted cycloalkyl, cycloalkyloxy, pyrrolidinyl, piperidinyl, morpholino, heterocycle, (heterocycle)oxy, and (heterocycle)alkyl; where preferred heteroatoms are oxygen, nitrogen, and sulfur. Additionally, where open valences exist on these substitute chemical groups they can be further substituted with alkyl, cycloalkyl, aryl, heteroaryl, and/or heterocycle groups, that where these open valences exist on carbon they can be further substituted by halogen and by oxygen-, nitrogen-, or sulfur-bonded substituents, and where multiple such open valences exist, these groups can be joined to form a ring, either by direct formation of a bond or by formation of bonds to a new heteroatom, preferably oxygen, nitrogen, or sulfur. It is further contemplated that the above substitutions can be made provided that replacing the hydrogen with the substituent does not introduce unacceptable instability to the molecules of the present invention, and is otherwise chemically reasonable. One of ordinary skill in the art would understand that with respect to any chemical group described as optionally substituted, only sterically practical and/or synthetically feasible chemical groups are meant to be included. “Optionally substituted” as used herein refers to all subsequent modifiers in a term or series of chemical groups. For example, in the term “optionally substituted arylalkyl,” the “alkyl” portion and the “aryl” portion of the molecule may or may not be substituted, and for the series “optionally substituted alkyl, cycloalkyl, aryl and heteroaryl,” the alkyl, cycloalkyl, aryl, and heteroaryl groups, independently of the others, may or may not be substituted.

[0119] “Reaction” as used herein refers to a process in which one or more substances or compounds or substrates is converted into one or more different substances, compounds, or processes.

### Oxidation of Bicyclic Proline Analogue Amines to Imines

[0120] The present invention provides novel biocatalysts and associated methods of use for the oxidative desymmetrization of fused bicyclic proline analogues to produce APIs and intermediates. The novel biocatalysts of the present disclosure are engineered monoamine oxidase enzymes with improved solubility, thermostability, and activity on fused bicyclic proline compounds, as compared to a reference monoamine oxidase. In particular, the engineered monoamine oxidase enzymes of the present disclosure require reduced enzyme loading (wt/wt) for the manufacturing of APIs and intermediates, as compared to a reference monoamine oxidase enzyme.

[0121] The monoamine oxidase biocatalysts of the present disclosure are engineered polypeptide variants of a previously engineered monoamine oxidase (SEQ ID NO: 6) derived from the monoamine oxidase of Aspergillus niger (SEQ ID NO: 2) and the monoamine oxidase of Aspergillus oryzae (SEQ ID NO: 4) WO2010/008828A2. These engineered polypeptides are capable of catalyzing the asymmetric oxidation of various fused bicyclic proline analogue amine compounds to imine compounds. In one embodiment, the monoamine oxidase polypeptide variants catalyze the conversion of 6,6-dimethyl-3-azabicyclo[3.1.0]hexane to (1R,5S)-6,6-dimethyl-3-azabicyclo[3.1.0]hex-2-ene. In other embodiments, the engineered monoamine oxidase enzymes of the present disclosure are used to produce various bicyclic proline analogues.

[0122] Therefore, in specific embodiments, the present disclosure provides engineered monoamine oxidase enzymes for preparation of the following fused bicyclic proline compounds, which are useful as intermediates for the synthesis of one or more therapeutic agents:

[chemical structure]

[0123] In certain other specific embodiments, the present disclosure provides biocatalytic processes for the synthesis of the following fused bicyclic proline compounds useful as intermediates for the synthesis of one or more therapeutic agents:

[chemical structure]

[0124] Thus, the present disclosure provides engineered monoamine oxidase enzymes for the synthesis of fused bicyclic proline compounds useful as intermediates for the synthesis of one or more therapeutic agents, as well as biocatalytic processes for the synthesis of these fused bicyclic proline compounds. The engineered monoamine oxidase enzymes of the present disclosure are useful in the biocatalytic processes disclosed below.

[chemical structure]

[0125] Scheme 1 depicts the reaction catalyzed by the engineered monoamine oxidase enzymes of the disclosure whereby a secondary amine, i.e., a heterobicyclic compound according to structural Formula I is oxidized to the corresponding imine compound of structural Formula II.

[0126] In some embodiments, the present disclosure provides a method of preparing a substantially stereomerically pure compound according to structural Formula II:

[chemical structure]

[0127] including salts and hydrates thereof, wherein:
   [0128] A is O, CR¹R², —C═C—, or —CH₂—CH₂—, wherein R¹ and R² are each independently selected from —H, —COOH, —X, —NH₂, —CH₂NHC(NH)NH₂, —CX₃, —CH₃, —CH₂CH₃, and wherein X is selected from F, Cl, and Br;
   [0129] the method comprising contacting an amine compound according to structural Formula I

[chemical structure]

wherein A, is as defined for structural Formula II, with oxygen in the presence of an engineered monoamine oxidase enzyme with a co-factor under conditions in which the engineered monoamine oxidase enzyme oxidizes the amine compound of structural Formula I to a corresponding imine compound of structural Formula II.

[0130] In certain embodiments, the oxidized imine compounds of structural Formula II may be isolated from the reaction mixture, purified, and characterized. In other embodiments, described below, the imine compounds of structural Formula II may be converted to another adduct or intermediate and used in a subsequent step without isolation or purification.

[chemical structure]

[0131] In some embodiments, the present disclosure provides a method of preparing a mixture comprising a substantially enantiomerically pure aminosulfonate compound according to structural Formula III(a) and a substantially enantiomerically pure aminosulfonate compound according to structural Formula III(b):

[chemical structure]

[0132] including salts and hydrates thereof, wherein:
   [0133] A is O, CR¹R², —C═C—, or —CH₂—CH₂—, wherein R¹ and R² are each independently selected from —H, —COOH, —X, —NH₂, —CH₂NHC(NH)NH₂, —CX₃, —CH₃, —CH₂CH₃, and wherein X is selected from F, Cl, and Br;
   [0134] the method comprising contacting an amine compound according to structural Formula I

[chemical structure]

wherein A is as defined for structural Formula III with oxygen in the presence of an engineered monoamine oxidase enzyme associated with a co-factor and with bisulfite under conditions which yield the mixture comprising a substantially enantiomerically aminosulfonate compound according to structural Formula III(a) and a substantially enantiomerically aminosulfonate compound according to structural Formula III(b).

[0135] In certain embodiments, the engineered monoamine oxidase of the disclosure may be inhibited by the product imine of structural Formula II. Accordingly, in particular embodiments, the reaction in which a compound of structural Formula I is oxidized to a compound of structural Formula II further comprises an agent that will react with the imine compound of structural Formula II to form an adduct with a reduced or eliminated ability to inhibit an engineered monoamine oxidase of the disclosure, as depicted in Scheme 2.

[0136] In one aspect of this embodiment, the agent is added at the beginning of the reaction or is added intermittently or continuously in amounts sufficiently high to prevent accumulation of an inhibitory amount of the imine compound of structural Formula II but low enough to avoid accumulation of an enzyme-inhibitory amount of that agent. In one embodiment, the agent is sodium bisulfite, which may be conveniently supplied as sodium metabisulfite, which hydrates in water to sodium bisulfite. Reaction of bisulfite with the imine compound of structural Formula II provides the sulfite adducts of structural Formula III. In certain embodiments, sodium bisulfite is added continuously to the reaction at a rate whereby this reagent is “instantaneously” consumed and the potentially inhibitory imine product of structural Formula II is “trapped” as the less inhibitory or non-inhibitory sulfite adduct compound of structural Formula III.

[0137] Whether the engineered monoamine oxidase is inhibited by the imine product or not, the addition of bisulfite to react the imine product also provides practical process engineering options. Certain imines of the invention are highly volatile and among those, some are malodorous and/or noxious. Their containment as free bases requires closed reactions, without gas flow, or efficient condensation of chemical trapping (e.g. by a bisulfite solution). In situ reaction to their bisulfite adducts (the aminosulfonates), obviates these engineering constraints while also providing the option to conduct the subsequent reaction with cyanide in the same reaction vessel.

[0138] Formation of the bisulfite adduct compound structural Formula III can be reversed at elevated pH, whereby the corresponding imine of structural Formula II is regenerated. Accordingly, in certain embodiments, the reaction of Scheme 2 is quenched by addition of base, e.g., 10 N NaOH, to raise the pH to about 13, regenerating the imine of structural Formula II which can be extracted, e.g., with methyl t-butyl ether (“MBTE”) and, in certain embodiments, isolated by distillation to provide an imine of structural Formula II as a colorless oil.

[0139] In certain embodiments, the rates of addition the substrate of structural Formula I, the sequestration agent (e.g., sodium bisulfite), and a pH control agent (e.g. NaOH) are monitored and controlled, in part, to minimize or obviate both substrate and product inhibition of the engineered monoamine oxidase used as the biocatalyst for conversion of a compound of structural Formula I to a compound of structural Formula II.

[chemical structure]

[0140] In some embodiments, the present disclosure provides a method of preparing a substantially enantiomerically pure aminonitrile compound according to structural Formula IV(a):

[chemical structure]

[0141] including salts and hydrates thereof, wherein:
   [0142] A is O, CR¹R², —C═C—, or —CH₂—CH₂—, wherein R¹ and R² are each independently selected from —H, —COOH, —X, —NH₂, —CH₂NHC(NH)NH₂, —CX₃, —CH₃, —CH₂CH₃, and wherein X is selected from F, Cl, and Br;
      the method comprising contacting an amine compound according to structural Formula I

[chemical structure]

wherein A is as defined for structural Formula IV with oxygen in the presence of an engineered monoamine oxidase enzyme associated with a co-factor and with bisulfite under conditions which yield a mixture comprising a substantially enantiomerically pure aminosulfonate compound according to structural Formula III(a) and a substantially enantiomerically pure aminosulfonate compound according to structural Formula III(b)

[chemical structure]

and
contacting the compounds according to structural Formulae III(a) and III(b) with cyanide under conditions which yield the substantially enantiomerically pure aminonitrile compound according to structural Formula IV(a).

[0143] In another embodiment, NaCN is added to the reaction of Scheme 2 and the pH allowed to rise to about pH 10, whereby the sulfite adducts of structural Formula III are stereoselectively converted to the trans aminonitrile compounds of structural Formula IV(a), as depicted in Scheme 3. In aspects of this embodiment, about 1 to about 3 equivalents, about 1 to about 2, about 1.05 to about 1.5 equivalents, or about 1.1 to about 1.2 equivalents of NaCN (relative to the imine compound of structural Formula II are added to the reaction to convert the sulfite adducts of structural Formula III to the trans aminonitrile compounds of structural Formula IV(a). Additionally, the reaction of the compound of Formula III produces the cis aminonitrile compounds of structural Formula IV(b).

[0144] The trans aminonitrile compounds of structural Formula IV(a) can be extracted from the reaction mixture (1:1 organic solvent: aqueous reaction mixture) using, e.g., 2-methyl tetrahydrofuran, MTBE, or iso-propyl acetate. The trans aminonitrile compound can be recovered from the organic solvent extract, e.g. the organic extract, with optional intermediate further clarifications, can be concentrated under reduced pressure to provide the aminonitrile compounds of structural Formula IV.

[0145] In another embodiment, the trans aminonitrile compounds of structural Formula IV(a) prepared e.g. according to Scheme 3 can be contacted with aqueous acid (e.g. HCl or H₂SO₄) to provide amino acids. In yet another embodiment, corresponding t-butyl esters can also be prepared by contacting the amine compounds with an acid (e.g., methane sulfonic acid) and isobutylene or a t-butyl ester (e.g., t-butyl acetate).

[0146] In another embodiment, the trans aminonitrile compounds of structural Formula IV(a) prepared e.g., according to Scheme 3 can be contacted with HCl and methanol in a Pinner reaction to provide methyl esters.

[chemical structure]

[0147] Scheme 4 depicts an overall process for the preparation of compounds according to structural Formula VII from the secondary amines of structural Formula I.

[0148] In some embodiments, the present disclosure provides a method of preparing a substantially stereomerically pure amino amide compound according to structural Formula VII:

[chemical structure]

[0149] including salts thereof, wherein:
   [0150] A is O, CR¹R², —C═C—, or —CH₂—CH₂—, wherein R¹ and R² are each independently selected from —H, —COOH, —X, —NH₂, —CH₂NHC(NH)NH₂, —CX₃, —CH₃, —CH₂CH₃, and wherein X is selected from F, Cl, and Br;
      the method comprising contacting an amine compound according to structural Formula I

[chemical structure]

wherein A is as defined for structural Formula VII with oxygen in the presence of an engineered monoamine oxidase enzyme associated with a co-factor and with bisulfite under conditions which yield a mixture comprising a substantially enantiomerically pure aminosulfonate compound according to structural Formula III(a) and a substantially enantiomerically pure aminosulfonate compound according to structural Formula III(b)

[chemical structure]

and
contacting a stereomerically pure bisulfite amine adduct compound according to structural Formula III(a), substantially stereomerically pure bisulfite amine adduct compound according to structural Formula III(b) or a mixture thereof with cyanide under conditions which yield the substantially stereomerically pure aminonitrile compound according to structural Formula IV(a)

[chemical structure]

wherein A is as defined for the amino compound of structural Formula VII; and contacting the aminonitrile compound of structural Formula IV(a) with an acid under conditions in which the aminonitrile compound is converted to the substantially stereomerically pure amino amide compound according to structural Formula VII.

[0151] In another embodiment, any of the above processes involving the trans-aminonitrile compounds of Formula IV(a) can be carried out with the cis-aminonitrile compounds of Formula IV(b) to form the corresponding cis amino acid and amide products.

### Engineered Monoamine Oxidase Polypeptides

[0152] The present disclosure provides engineered monoamine polypeptides, polynucleotides encoding the polypeptides, methods of preparing the polypeptides, and methods for using the polypeptides. Where the description relates to polypeptides, it is to be understood that it can describe the polynucleotides encoding the polypeptides.

[0153] Suitable reaction conditions under which the above-described improved properties of the engineered polypeptides carry out the desired reaction can be determined with respect to concentrations or amounts of polypeptide, substrate, co-substrate, buffer, solvent, pH, conditions including temperature and reaction time, and/or conditions with the polypeptide immobilized on a solid support, as further described below and in the Examples.

[0154] In some embodiments, exemplary engineered monoamine oxidase polypeptides with improved properties, particularly in the conversion of bicyclic proline analogues of Formula I to the corresponding imines of Formula II, comprise an amino acid sequence that has one or more residue differences as compared to SEQ ID NOs: 6 and/or 414 at the residue positions indicated in Tables 4.2, 5.1, 6.1, 7.1, 8.1, and 9.1.

[0155] The structure and function information for exemplary non-naturally occurring (or engineered) polypeptides of the present invention are based on the conversion of bicyclic proline analogues of Formula I to the corresponding imines of Formula II, the results of which are shown below in Tables 4.2, 5.1, 6.1, 7.1, 8.1, and 9.1, as further described in the Examples. The odd numbered sequence identifiers (i.e., SEQ ID NOs) in these Tables refer to the nucleotide sequence encoding the amino acid sequence provided by the even numbered SEQ ID NOs in these Tables. Exemplary sequences are provided in the electronic sequence listing file accompanying this invention, which is hereby incorporated by reference herein. The amino acid residue differences are based on comparison to the reference sequence of SEQ ID NOs: 6 and/or 414, as indicated.

[0156] The previously engineered monoamine oxidase (SEQ ID NO: 6) derived from the monoamine oxidase of Aspergillus niger (SEQ ID NO: 2) and the monoamine oxidase of Aspergillus oryzae (SEQ ID NO: 4) was selected based on conversion of bicyclic proline analogues of Formula I to the corresponding imines of Formula II. SEQ ID NO: 5 is a codon-optimized polynucleotide for expression in Escherichia coli that was synthesized based on the polypeptide sequence of SEQ ID NO: 6.

[0157] The activity of each engineered monoamine oxidase polypeptide relative to the reference polypeptide of SEQ ID NOs: 6 and/or 414 was determined as conversion of the substrates described in the Examples herein. In some embodiments, a shake flask powder (SFP) is used as a secondary screen to assess the properties of the engineered monoamine oxidase polypeptides, the results of which are provided in the Examples. In some embodiments, the SFP forms provide a more purified powder preparation of the engineered polypeptides and can contain the engineered polypeptides that are up to about 30% of total protein.

[0158] In some embodiments, the specific enzyme properties are associated with the residues differences as compared to SEQ ID NOs: 6 and/or 414 at the residue positions indicated herein. In some embodiments, residue differences affecting polypeptide expression can be used to increase expression of the engineered monoamine oxidase polypeptides.

[0159] In light of the guidance provided herein, it is further contemplated that any of the exemplary engineered polypeptides comprising the even-numbered sequences of SEQ ID NOs: 6 and/or 414 find use as the starting amino acid sequence for synthesizing other engineered monoamine oxidase polypeptides, for example by subsequent rounds of evolution that incorporate new combinations of various amino acid differences from other polypeptides in Tables 4.2, 5.1, 6.1, 7.1, 8.1, and 9.1, and other residue positions described herein. Further improvements may be generated by including amino acid differences at residue positions that had been maintained as unchanged throughout earlier rounds of evolution.

[0160] In some embodiments, the engineered monoamine oxidase polypeptide comprises an amino acid sequence having at least 80%, 85%, 86%, 87%, 88%, 89%, 90%, 91%, 92%, 93%, 94%, 95%, 96%, 97%, 98%, 99% or more sequence identity to reference sequence SEQ ID NO: 6 and one or more residue differences as compared to SEQ ID NO: 6, selected from 13, 32/65/135/246/284, 32/135/284, 32/284, 47/197, 55/347/348, 61, 65/135, 65/190, 65/246, 65/284, 79, 80, 82, 85, 87, 87/185, 93, 100, 100/144/421/447, 100/144/447, 104, 107, 113, 114, 115, 117, 127, 135, 136, 144, 144/447, 145, 146, 147, 149, 149/157, 153, 155, 161, 162, 166, 167, 169, 170, 174, 177, 181, 184, 185, 187/242, 193, 196, 198, 199, 208, 211, 218, 219, 219/332, 221, 229, 232, 234, 238, 239, 240, 242, 246, 250, 252, 254, 260, 262/266/421, 262/421/447, 266/447, 277, 277/347, 284, 290, 292, 294, 298, 300, 306, 310, 323, 332, 338, 347, 349, 359, 361, 366, 381, 385, 386, 387, 392, 393, 400, 407, 411/445, 413, 418, 421, 425, 429, 433, 434, 441, 444, 445, 447, 449, 452, 475, and 483. In some embodiments, the engineered monoamine oxidase polypeptide comprises an amino acid sequence having at least 80%, 85%, 86%, 87%, 88%, 89%, 90%, 91%, 92%, 93%, 94%, 95%, 96%, 97%, 98%, 99% or more sequence identity to reference sequence SEQ ID NO: 6 and one or more residue differences as compared to SEQ ID NO: 6, selected from 13G, 32G/65V/135Q/246M/284D, 32G/135Q/284D, 32G/284D, 47A/197N, 55A/347D/348K, 61C, 65V/135Q, 65V/190D, 65V/246M, 65V/284D, 79A, 79D, 79Q, 79S, 79V, 79Y, 80H, 80I, 80N, 80T, 80V, 82F, 82L, 82R, 82W, 85D, 85S, 87G, 87H, 87L, 87Q/185F, 87S, 87W, 87Y, 93G, 100P, 100P/144E/421S/447A, 100P/144E/447A, 104K, 107W, 113G, 113W, 114G, 115M, 117A, 117C, 117I, 117K, 117L, 117R, 117S, 117T, 127D, 127G, 127R, 135G, 136R, 144E/447A, 144M, 145G, 145L, 145S, 146A, 146F, 147A, 149M, 149M/157A, 149V, 153T, 155C, 155L, 155Q, 155R, 161D, 161L, 161R, 161Y, 162Q, 166E, 166G, 166L, 167C, 169G, 170K, 174G, 174S, 174T, 174V, 177G, 177R, 177W, 181C, 181G, 181L, 181P, 184F, 184R, 185G, 185K, 185L, 185R, 187P/242I, 193A, 196G, 196M, 198D, 199I, 199T, 199V, 208S, 211G, 218G, 219P/332L, 219S, 221C, 221R, 221V, 229E, 232T, 234V, 238K, 238R, 239G, 240A, 242I, 246M, 250V, 252A, 252E, 252G, 252L, 254A, 260F, 260S, 260V, 262F/266L/421S, 262F/421S/447A, 266L/447A, 277T, 277T/347D, 284D, 290Q, 290Y, 292N, 294V, 298C, 300R, 306V, 310S, 323R, 332G, 332L, 332S, 338A, 338G, 338S, 347D, 347N, 349E, 359S, 361L, 366G, 381A, 385G, 386E, 386G, 387I, 387Q, 387W, 392G, 392S, 393G, 393K, 393M, 400D, 407G, 411V/445R, 413R, 418A, 418G, 421S, 425L, 429G, 433N, 433S, 434E, 441H, 444D, 444L, 444R, 444S, 445D, 445R, 447A, 449R, 449S, 452M, 475E, 475I, 475L, 475S, and 483R. In some embodiments, the engineered monoamine oxidase polypeptide comprises an amino acid sequence having at least 80%, 85%, 86%, 87%, 88%, 89%, 90%, 91%, 92%, 93%, 94%, 95%, 96%, 97%, 98%, 99% or more sequence identity to reference sequence SEQ ID NO: 6 and one or more residue differences as compared to SEQ ID NO: 6, selected from T13G, E32G/T65V/T135Q/I246M/N284D, E32G/T135Q/N284D, E32G/N284D, G47A/D197N, T55A/C347D/P348K, A61C, T65V/T135Q, T65V/E190D, T65V/I246M, T65V/N284D, W79A, W79D, W79Q, W79S, W79V, W79Y, S80H, S80I, S80N, S80T, S80V, N82F, N82L, N82R, N82W, G85D, G85S, P87G, P87H, P87L, P87Q/E185F, P87S, P87W, P87Y, T93G, S100P, S100P/A144E/C421S/C447A, S100P/A144E/C447A, R104K, T107W, N113G, N113W, A114G, L115M, P117A, P117C, P117I, P117K, P117L, P117R, P117S, P117T, H127D, H127G, H127R, T135G, T136R, A144E/C447A, A144M, E145G, E145L, E145S, D146A, D146F, E147A, L149M, L149M/T157A, L149V, L153T, K155C, K155L, K155Q, K155R, G161D, G161L, G161R, G161Y, T162Q, T166E, T166G, T166L, V167C, P169G, F170K, M174G, M174S, M174T, M174V, V177G, V177R, V177W, R181C, R181G, R181L, R181P, D184F, D184R, E185G, E185K, E185L, E185R, S187P/M242I, D193A, R196G, R196M, E198D, L199I, L199T, L199V, E208S, I211G, T218G, L219P/I332L, L219S, N221C, N221R, N221V, H229E, A232T, S234V, Y238K, Y238R, Q239G, G240A, M242I, 1246M, F250V, D252A, D252E, D252G, D252L, Q254A, R260F, R260S, R260V, W262F/A266L/C421S, W262F/C421S/C447A, A266L/C447A, C277T, C277T/C347D, N284D, R290Q, R290Y, T292N, R294V, E298C, A300R, C306V, L310S, S323R, I332G, I332L, I332S, C338A, C338G, C338S, C347D, C347N, D349E, P359S, N361L, A366G, C381A, A385G, H386E, H386G, N387I, N387Q, N387W, E392G, E392S, E393G, E393K, E393M, M400D, P407G, D411V/L445R, K413R, H418A, H418G, C421S, F425L, A429G, A433N, A433S, P434E, S441H, E444D, E444L, E444R, E444S, L445D, L445R, C447A, H449R, H449S, V452M, T475E, T475I, T475L, T475S, and E483R.

[0161] In some embodiments, the engineered monoamine oxidase polypeptide comprises an amino acid sequence having at least 80%, 85%, 86%, 87%, 88%, 89%, 90%, 91%, 92%, 93%, 94%, 95%, 96%, 97%, 98%, 99% or more sequence identity to reference sequence SEQ ID NO: 6 and one or more residue differences as compared to SEQ ID NO: 6, selected from 79, 80, 87, 146, 149, 219/332, 238, 260, 262/266/421, 338, and 429. In some embodiments, the engineered monoamine oxidase comprises an amino acid sequence having at least 80%, 85%, 86%, 87%, 88%, 89%, 90%, 91%, 92%, 93%, 94%, 95%, 96%, 97%, 98%, 99% or more sequence identity to reference sequence SEQ ID NO: 6 and one or more residue differences as compared to SEQ ID NO: 6, selected from 79D, 80V, 87G, 146A, 149M, 219P/332L, 238R, 260S, 262F/266L/421S, 338G, and 429G. In some embodiments, the engineered monoamine oxidase comprises an amino acid sequence having at least 80%, 85%, 86%, 87%, 88%, 89%, 90%, 91%, 92%, 93%, 94%, 95%, 96%, 97%, 98%, 99% or more sequence identity to reference sequence SEQ ID NO: 6 and one or more residue differences as compared to SEQ ID NO: 6, selected from W79D, S80V, P87G, D146A, L149M, L219P/I332L, Y238R, R260S, W262F/A266L/C421S, C338G, and A429G.

[0162] In some embodiments, the engineered monoamine oxidase comprises an amino acid sequence having at least 80%, 85%, 86%, 87%, 88%, 89%, 90%, 91%, 92%, 93%, 94%, 95%, 96%, 97%, 98%, 99% or more sequence identity to reference sequence SEQ ID NO: 6 and one or more residue differences as compared to SEQ ID NO: 6, selected from 79, 79/80, 79/80/332/429, 79/93, 79/93/238/386/429, 79/93/386, 79/183/284/332, 79/238, 79/238/332/429, 79/238/429, 80, 80/183/284/332/381/386/429, 80/188/190/332/386, 80/237/332, 80/238/332, 80/238/386/429, 80/284, 80/284/386, 80/332, 80/332/381/386, 80/332/386, 80/381, 80/386, 80/386/429, 80/429, 82, 82/87, 82/87/113, 82/87/113/117/218, 82/87/113/117/219, 82/87/113/117/219/418, 82/87/113/117/260/338, 82/87/113/117/338/418, 82/87/113/421, 82/87/117, 82/87/117/218/421, 82/87/117/260/338/421, 82/87/117/338/418, 82/87/218, 82/87/218/219/338, 82/87/218/219/421, 82/87/218/338, 82/87/219, 82/87/219/421, 82/87/338, 82/87/338/418, 82/87/338/421, 82/113/218/338, 82/113/218/338/418, 82/113/219/338, 82/113/338, 82/218/219/421, 82/260/338/421, 82/338/418/421, 82/418, 87, 87/113, 87/113/117/219/338/418/421, 87/113/117/260/338/421, 87/113/117/418/421, 87/113/218/219/260/338, 87/113/219/421, 87/113/260, 87/117, 87/117/218/219, 87/117/219/310/338, 87/218, 87/218/219, 87/218/219/338, 87/218/418, 87/219, 87/219/338, 87/219/418, 87/260, 87/310, 87/310/338, 87/338, 87/418, 87/421, 93/184/429, 93/238, 93/238/284, 93/238/386, 93/238/386/429, 100, 100/143/145/146/149/198/242/347/348/445/447, 100/143/145/149/347/447, 100/145/146/149, 100/145/146/149/154/348/445, 100/145/146/149/198, 100/145/146/149/198/242/250/252/347/348/447, 100/145/146/149/205/347/445/447, 100/145/146/149/242/445, 100/145/146/149/250/277/347/348/447, 100/145/149/154/246/277, 100/145/149/198/242/246/277/348/447, 100/145/149/198/242/246/445/447, 100/145/149/198/242/277/347/348/447, 100/145/149/198/252/348/445, 100/145/149/205, 100/145/149/242/246/277/347/445, 100/145/149/242/246/347/348/445/447, 100/145/149/242/445/447, 100/145/149/246/252/277/347/445/447, 100/145/149/246/347/445, 100/145/149/277/348/445, 100/145/149/347/445/447, 100/145/198/242/246/348, 100/145/198/277/348/445, 100/145/198/300, 100/145/205/246/277/348/445, 100/145/205/277/348, 100/145/242/246/277/445/447, 100/145/246/347/348/445, 100/145/277/347, 100/145/348, 100/146/149/198/242/246/277/347/348/445/447, 100/146/198/347/348/447, 100/146/198/445, 100/146/242/277/447, 100/146/250/447, 100/146/347/348/445/447, 100/149/198, 100/149/242/246/277/347/348/445, 100/149/242/246/277/347/348/447, 100/149/242/347/348/447, 100/149/246/277/348/445, 100/149/246/447, 100/149/250/347/447, 100/198/205/348, 100/198/277/347/348, 100/198/347/348, 100/198/347/348/445, 100/198/347/445, 100/198/447, 100/242/246/277, 100/242/246/347, 100/242/277/348, 100/242/347/348/445, 100/242/347/348/445/447, 100/242/348/445, 100/246/277/348/445, 100/277/347/445/447, 100/277/348, 100/277/348/447, 100/347/348/445, 100/347/447, 100/445/447, 110/338/418, 113/218/338/421, 113/338, 113/338/421, 117/219, 117/260, 121/198/347/445/447, 145/146/149/154/246/277/347/348, 145/146/149/198/242/252/277/347, 145/146/149/198/277/445/447, 145/146/149/205/348/447, 145/146/149/250/277/347/348/447, 145/146/149/277/347, 145/146/149/347/348, 145/146/198/205/242/277/348/447, 145/146/198/445/447, 145/146/246/277/447, 145/146/246/347/348/447, 145/146/277/347, 145/146/347/447, 145/149/198/205/348, 145/149/198/242/246/277/347/447, 145/149/198/242/246/348, 145/149/198/242/277/347, 145/149/198/246/447, 145/149/198/347/447, 145/149/205/242/347/348/445, 145/149/205/246/250/252, 145/149/205/277/445, 145/149/242, 145/149/242/348, 145/149/246, 145/149/246/347/445, 145/149/246/447, 145/149/347/348/445, 145/149/347/447, 145/149/447, 145/155/445/447, 145/198/205/348, 145/246, 145/246/252/347/447, 145/250/252/348, 145/252/348/447, 145/255, 145/277/347/445, 145/277/348/447, 145/347/348/445/447/491, 145/445/447, 146/149/151/246/348, 146/149/242/246/445, 146/149/246/252/447, 146/149/277/348/447, 146/198/246/277, 146/198/277/348/447, 146/242, 146/242/246/277/347/348/445/447, 146/246/277/348/445/447, 146/277, 146/277/347/348, 146/277/347/445/447, 146/277/445/447, 146/347/348/447, 146/348, 146/445/447, 149, 149/198/277/347/348, 149/198/348, 149/198/445, 149/242/246, 149/242/246/348/445, 149/347/348/445/447, 149/445, 184, 184/284, 184/284/429, 184/386, 198/242/348, 198/246, 198/250, 198/277/348/447, 198/445, 205, 205/246/347, 205/252/347/445/447, 205/347/348/445/447, 218, 218/260/338, 219, 219/338/418, 219/421, 238, 238/242/284, 238/284/386/429, 238/332/429, 238/381/429, 238/386, 238/429, 242, 242/277/347/348, 242/284/381/429, 242/348, 242/445/447, 246, 246/277/348/447, 246/445/447, 260, 260/338, 260/338/418/421, 277/347/348/445, 277/347/447, 284, 284/332, 284/386, 284/386/429, 310/338/418, 310/418/421, 332, 332/386, 332/429, 338, 338/418, 347/348/445, 347/348/447, 348, 348/445/447, 348/447, 386, 386/429, 418, 429, and 447. In some embodiments, the engineered monoamine oxidase comprises an amino acid sequence having at least 80%, 85%, 86%, 87%, 88%, 89%, 90%, 91%, 92%, 93%, 94%, 95%, 96%, 97%, 98%, 99% or more sequence identity to reference sequence SEQ ID NO: 6 and one or more residue differences as compared to SEQ ID NO: 6, selected from 79A/80H, 79A/93G/238R/386E/429G, 79A/93G/386E, 79A/238R, 79A/238R/332G/429G, 79A/238R/429G, 79D, 79D/80V, 79D/80V/332G/429G, 79D/93G, 79D/183F/284D/332G, 80H, 80H/183F/284D/332G/381A/386E/429G, 80H/188F/190D/332G/386E, 80H/238R/386E/429G, 80H/332G/381A/386E, 80H/381A, 80H/386E, 80H/429G, 80V, 80V/237S/332G, 80V/238R/332G, 80V/284D, 80V/284D/386E, 80V/332G, 80V/332G/386E, 80V/386E, 80V/386E/429G, 82F, 82F/87G/113G/117K/219S, 82F/87G/113G/117K/260S/338G, 82F/87G/117K, 82F/87G/218G, 82F/87G/218G/219S/421S, 82F/87G/218G/338S, 82F/87G/338S/418G, 82F/87L, 82F/87L/113G/117K/218G, 82F/87L/113G/117K/219S/418G, 82F/87L/113G/117K/338G/418G, 82F/87L/117K, 82F/87L/219S/421S, 82F/87L/338S, 82F/113G/218G/338S/418G, 82F/418G, 82R/87G, 82R/87G/113G/421S, 82R/87G/117K/218G/421S, 82R/87G/117K/260S/338S/421S, 82R/87G/117K/338A/418G, 82R/87L, 82R/87L/113G, 82R/87L/218G/219S/338S, 82R/87L/219S, 82R/87L/338G/421S, 82R/113G/218G/338A, 82R/113G/219S/338S, 82R/113G/338S, 82R/218G/219S/421S, 82R/260S/338A/421S, 82R/338A/418G/421S, 87G, 87G/113G, 87G/113G/117K/418G/421S, 87G/113G/260S, 87G/117K/219S/310S/338S, 87G/218G/219S/338S, 87G/219S, 87G/260S, 87G/310S, 87G/310S/338S, 87G/338A, 87G/418G, 87L, 87L/113G, 87L/113G/117K/219S/338G/418G/421S, 87L/113G/117K/260S/338S/421S, 87L/113G/218G/219S/260S/338A, 87L/113G/219S/421S, 87L/117K, 87L/117K/218G/219S, 87L/218G, 87L/218G/219S, 87L/218G/418G, 87L/219S, 87L/219S/338G, 87L/219S/418G, 87L/338A, 87L/421S, 93G/184R/429G, 93G/238R, 93G/238R/284D, 93G/238R/386E, 93G/238R/386E/429G, 100P, 100P/143D/145S/146A/149M/198D/242I/347N/348K/445R/447A, 100P/143V/145G/149M/347N/447A, 100P/145G/146A/149M/250V/277T/347N/348K/447A, 100P/145G/149M/154L/246M/277T, 100P/145G/149M/198D/242I/246M/445R/447A, 100P/145G/149M/198D/252G/348K/445R, 100P/145G/149M/205T, 100P/145G/149M/242I/246M/347D/348K/445R/447A, 100P/145G/149M/242I/445R/447A, 100P/145G/198D/242I/246M/348K, 100P/145G/198D/277T/348K/445R, 100P/145G/198D/300V, 100P/145G/205T/246M/277T/348K/445R, 100P/145G/242I/246M/277T/445R/447A, 100P/145G/348K, 100P/145S/146A/149M, 100P/145S/146A/149M/154L/348K/445R, 100P/145S/146A/149M/198D, 100P/145S/146A/149M/198D/242I/250V/252G/347N/348K/447A, 100P/145S/146A/149M/205T/347D/445R/447A, 100P/145S/146A/149M/242I/445R, 100P/145S/149M/198D/242I/246M/277T/348K/447A, 100P/145S/149M/198D/242I/277T/347N/348K/447A, 100P/145S/149M/242I/246M/277T/347N/445R, 100P/145S/149M/246M/252G/277T/347N/445R/447A, 100P/145S/149M/246M/347N/445R, 100P/145S/149M/277T/348K/445R, 100P/145S/149M/347N/445R/447A, 100P/145S/205T/277T/348K, 100P/145S/246M/347N/348K/445R, 100P/145S/277T/347N, 100P/146A/149M/198D/242I/246M/277T/347D/348K/445R/447A, 100P/146A/198D/347D/348K/447A, 100P/146A/198D/445R, 100P/146A/242I/277T/447A, 100P/146A/250V/447A, 100P/146A/347D/348K/445R/447A, 100P/149M/198D, 100P/149M/242I/246M/277T/347N/348K/445R, 100P/149M/242I/246M/277T/347N/348K/447A, 100P/149M/242I/347N/348K/447A, 100P/149M/246M/277T/348K/445R, 100P/149M/246M/447A, 100P/149M/250V/347N/447A, 100P/198D/205T/348K, 100P/198D/277T/347N/348K, 100P/198D/347D/348K, 100P/198D/347D/348K/445R, 100P/198D/347N/445R, 100P/198D/447A, 100P/242I/246M/277T, 100P/242I/246M/347N, 100P/242I/277T/348K, 100P/242I/347D/348K/445R, 100P/242I/347D/348K/445R/447A, 100P/242I/348K/445R, 100P/246M/277T/348K/445R, 100P/277T/347D/445R/447A, 100P/277T/348K, 100P/277T/348K/447A, 100P/347N/348K/445R, 100P/347N/447A, 100P/445R/447A, 110N/338G/418G, 113G/218G/338S/421S, 113G/338A/421S, 113G/338G, 117K/219S, 117K/260S, 121C/198D/347N/445R/447A, 145G/146A/149M/277T/347D, 145G/146A/149M/347D/348K, 145G/146A/277T/347N, 145G/146A/347D/447A, 145G/149M/198D/347N/447A, 145G/149M/205T/242I/347N/348K/445R, 145G/149M/205T/246M/250V/252G, 145G/149M/242I/348K, 145G/149M/246M, 145G/155I/445R/447A, 145G/198D/205T/348K, 145G/250V/252G/348K, 145G/255R, 145G/277T/347N/445R, 145S/146A/149M/154L/246M/277T/347N/348K, 145S/146A/149M/198D/242I/252G/277T/347N, 145S/146A/149M/198D/277T/445R/447A, 145S/146A/149M/205T/348K/447A, 145S/146A/149M/250V/277T/347D/348K/447A, 145S/146A/198D/205T/242I/277T/348K/447A, 145S/146A/198D/445R/447A, 145S/146A/246M/277T/447A, 145S/146A/246M/347N/348K/447A, 145S/149M/198D/205T/348K, 145S/149M/198D/242I/246M/277T/347N/447A, 145S/149M/198D/242I/246M/348K, 145S/149M/198D/242I/277T/347D, 145S/149M/198D/246M/447A, 145S/149M/205T/277T/445R, 145S/149M/242I, 145S/149M/246M/347D/445R, 145S/149M/246M/447A, 145S/149M/347N/348K/445R, 145S/149M/347N/447A, 145S/149M/447A, 145S/246M, 145S/246M/252G/347D/447A, 145S/252G/348K/447A, 145S/277T/348K/447A, 145S/347D/348K/445R/447A/491A, 145S/445R/447A, 146A/149M/151C/246M/348K, 146A/149M/242I/246M/445R, 146A/149M/246M/252G/447A, 146A/149M/277T/348K/447A, 146A/198D/246M/277T, 146A/198D/277T/348K/447A, 146A/242I, 146A/242I/246M/277T/347N/348K/445R/447A, 146A/246M/277T/348K/445R/447A, 146A/277T, 146A/277T/347N/348K, 146A/277T/347N/445R/447A, 146A/277T/445R/447A, 146A/347D/348K/447A, 146A/348K, 146A/445R/447A, 149M, 149M/198D/277T/347N/348K, 149M/198D/348K, 149M/198D/445R, 149M/242I/246M, 149M/242I/246M/348K/445R, 149M/347N/348K/445R/447A, 149M/445R, 184R, 184R/284D, 184R/284D/429G, 184R/386E, 198D/242I/348K, 198D/246M, 198D/250V, 198D/277T/348K/447A, 198D/445R, 205T, 205T/246M/347N, 205T/252G/347D/445R/447A, 205T/347D/348K/445R/447A, 218G, 218G/260S/338A, 2195, 2195/338A/418G, 219S/421S, 238R, 238R/242L/284D, 238R/284D/386E/429G, 238R/332G/429G, 238R/381A/429G, 238R/386E, 238R/429G, 242I, 242I/277T/347D/348K, 242I/348K, 242I/445R/447A, 242L/284D/381A/429G, 246M, 246M/277T/348K/447A, 246M/445R/447A, 260S, 260S/338G, 260S/338G/418G/421S, 277T/347N/348K/445R, 277T/347N/447A, 284D, 284D/332G, 284D/386E, 284D/386E/429G, 310S/338S/418G, 310S/418G/421S, 332G, 332G/386E, 332G/429G, 338G, 338G/418G, 347N/348K/445R, 347N/348K/447A, 348K, 348K/445R/447A, 348K/447A, 386E, 386E/429G, 418G, 429G, and 447A. In some embodiments, the engineered monoamine oxidase polypeptide comprises an amino acid sequence having at least 80%, 85%, 86%, 87%, 88%, 89%, 90%, 91%, 92%, 93%, 94%, 95%, 96%, 97%, 98%, 99% or more sequence identity to reference sequence SEQ ID NO: 6 and one or more residue differences as compared to SEQ ID NO: 6, selected from W79A/S80H, W79A/T93G/Y238R/H386E/A429G, W79A/T93G/H386E, W79A/Y238R, W79A/Y238R/I332G/A429G, W79A/Y238R/A429G, W79D, W79D/S80V, W79D/S80V/I332G/A429G, W79D/T93G, W79D/Y183F/N284D/I332G, S80H, S80H/Y183F/N284D/I332G/C381A/H386E/A429G, S80H/Y188F/E190D/I332G/H386E, S80H/Y238R/H386E/A429G, S80H/I332G/C381A/H386E, S80H/C381A, S80H/H386E, S80H/A429G, S80V, S80V/T237S/I332G, S80V/Y238R/I332G, S80V/N284D, S80V/N284D/H386E, S80V/I332G, S80V/I332G/H386E, S80V/H386E, S80V/H386E/A429G, N82F, N82F/P87G/N113G/P117K/L219S, N82F/P87G/N113G/P117K/R260S/C338G, N82F/P87G/P117K, N82F/P87G/T218G, N82F/P87G/T218G/L219S/C421S, N82F/P87G/T218G/C338S, N82F/P87G/C338S/H418G, N82F/P87L, N82F/P87L/N113G/P117K/T218G, N82F/P87L/N113G/P117K/L219S/H418G, N82F/P87L/N113G/P117K/C338G/H418G, N82F/P87L/P117K, N82F/P87L/L219S/C421S, N82F/P87L/C338S, N82F/N113G/T218G/C338S/H418G, N82F/H418G, N82R/P87G, N82R/P87G/N113G/C421S, N82R/P87G/P117K/T218G/C421S, N82R/P87G/P117K/R260S/C338S/C421S, N82R/P87G/P117K/C338A/H418G, N82R/P87L, N82R/P87L/N113G, N82R/P87L/T218G/L219S/C338S, N82R/P87L/L219S, N82R/P87L/C338G/C421S, N82R/N113G/T218G/C338A, N82R/N113G/L219S/C338S, N82R/N113G/C338S, N82R/T218G/L219S/C421S, N82R/R260S/C338A/C421S, N82R/C338A/H418G/C421S, P87G, P87G/N113G, P87G/N113G/P117K/H418G/C421S, P87G/N113G/R260S, P87G/P117K/L219S/L310S/C338S, P87G/T218G/L219S/C338S, P87G/L219S, P87G/R260S, P87G/L310S, P87G/L310S/C338S, P87G/C338A, P87G/H418G, P87L, P87L/N113G, P87L/N113G/P117K/L219S/C338G/H418G/C421S, P87L/N113G/P117K/R260S/C338S/C421S, P87L/N113G/T218G/L219S/R260S/C338A, P87L/N113G/L219S/C421S, P87L/P117K, P87L/P117K/T218G/L219S, P87L/T218G, P87L/T218G/L219S, P87L/T218G/H418G, P87L/L219S, P87L/L219S/C338G, P87L/L219S/H418G, P87L/C338A, P87L/C421S, T93G/D184R/A429G, T93G/Y238R, T93G/Y238R/N284D, T93G/Y238R/H386E, T93G/Y238R/H386E/A429G, S100P, S100P/E143D/E145S/D146A/L149M/E198D/M242I/C347N/P348K/L445R/C447A, S100P/E143V/E145G/L149M/C347N/C447A, S100P/E145G/D146A/L149M/F250V/C277T/C347N/P348K/C447A, S100P/E145G/L149M/H154L/I246M/C277T, S100P/E145G/L149M/E198D/M242I/I246M/L445R/C447A, S100P/E145G/L149M/E198D/D252G/P348K/L445R, S100P/E145G/L149M/S205T, S100P/E145G/L149M/M242U/246M/C347D/P348K/L445R/C447A, S100P/E145G/L149M/M242I/L445R/C447A, S100P/E145G/E198D/M242I/I246M/P348K, S100P/E145G/E198D/C277T/P348K/L445R, S100P/E145G/E198D/A300V, S100P/E145G/S205T/I246M/C277T/P348K/L445R, S100P/E145G/M242I/I246M/C277T/L445R/C447A, S100P/E145G/P348K, S100P/E145S/D146A/L149M, S100P/E145S/D146A/L149M/H154L/P348K/L445R, S100P/E145S/D146A/L149M/E198D, S100P/E145S/D146A/L149M/E198D/M242I/F250V/D252G/C347N/P348K/C447A, S100P/E145S/D146A/L149M/S205T/C347D/L445R/C447A, S100P/E145S/D146A/L149M/M242I/L445R, S100P/E145S/L149M/E198D/M242I/I246M/C277T/P348K/C447A, S100P/E145S/L149M/E198D/M242I/C277T/C347N/P348K/C447A, S100P/E145S/L149M/M242I/I246M/C277T/C347N/L445R, S100P/E145S/L149M/I246M/D252G/C277T/C347N/L445R/C447A, S100P/E145S/L149M/I246M/C347N/L445R, S100P/E145S/L149M/C277T/P348K/L445R, S100P/E145S/L149M/C347N/L445R/C447A, S100P/E145S/S205T/C277T/P348K, S100P/E145S/I246M/C347N/P348K/L445R, S100P/E145S/C277T/C347N, S100P/D146A/L149M/E198D/M242I/I246M/C277T/C347D/P348K/L445R/C447A, S100P/D146A/E198D/C347D/P348K/C447A, S100P/D146A/E198D/L445R, S100P/D146A/M242I/C277T/C447A, S100P/D146A/F250V/C447A, S100P/D146A/C347D/P348K/L445R/C447A, S100P/L149M/E198D, S100P/L149M/M242U/246M/C277T/C347N/P348K/L445R, S100P/L149M/M242U/246M/C277T/C347N/P348K/C447A, S100P/L149M/M242I/C347N/P348K/C447A, S100P/L149M/I246M/C277T/P348K/L445R, S100P/L149M/I246M/C447A, S100P/L149M/F250V/C347N/C447A, S100P/E198D/S205T/P348K, S100P/E198D/C277T/C347N/P348K, S100P/E198D/C347D/P348K, S100P/E198D/C347D/P348K/L445R, S100P/E198D/C347N/L445R, S100P/E198D/C447A, S100P/M242I/I246M/C277T, S100P/M242I/I246M/C347N, S100P/M242I/C277T/P348K, S100P/M242I/C347D/P348K/L445R, S100P/M242I/C347D/P348K/L445R/C447A, S100P/M242I/P348K/L445R, S100P/I246M/C277T/P348K/L445R, S100P/C277T/C347D/L445R/C447A, S100P/C277T/P348K, S100P/C277T/P348K/C447A, S100P/C347N/P348K/L445R, S100P/C347N/C447A, S100P/L445R/C447A, K110N/C338G/H418G, N113G/T218G/C338S/C421S, N113G/C338A/C421S, N113G/C338G, P117K/L219S, P117K/R260S, F121C/E198D/C347N/L445R/C447A, E145G/D146A/L149M/C277T/C347D, E145G/D146A/L149M/C347D/P348K, E145G/D146A/C277T/C347N, E145G/D146A/C347D/C447A, E145G/L149M/E198D/C347N/C447A, E145G/L149M/S205T/M242I/C347N/P348K/L445R, E145G/L149M/S205T/I246M/F250V/D252G, E145G/L149M/M242I/P348K, E145G/L149M/I246M, E145G/K155I/L445R/C447A, E145G/E198D/S205T/P348K, E145G/F250V/D252G/P348K, E145G/S255R, E145G/C277T/C347N/L445R, E145S/D146A/L149M/H154L/I246M/C277T/C347N/P348K, E145S/D146A/L149M/E198D/M242I/D252G/C277T/C347N, E145S/D146A/L149M/E198D/C277T/L445R/C447A, E145S/D146A/L149M/S205T/P348K/C447A, E145S/D146A/L149M/F250V/C277T/C347D/P348K/C447A, E145S/D146A/E198D/S205T/M242I/C277T/P348K/C447A, E145S/D146A/E198D/L445R/C447A, E145S/D146A/I246M/C277T/C447A, E145S/D146A/I246M/C347N/P348K/C447A, E145S/L149M/E198D/S205T/P348K, E145S/L149M/E198D/M242I/I246M/C277T/C347N/C447A, E145S/L149M/E198D/M242I/I246M/P348K, E145S/L149M/E198D/M242I/C277T/C347D, E145S/L149M/E198D/I246M/C447A, E145S/L149M/S205T/C277T/L445R, E145S/L149M/M242I, E145S/L149M/I246M/C347D/L445R, E145S/L149M/I246M/C447A, E145S/L149M/C347N/P348K/L445R, E145S/L149M/C347N/C447A, E145S/L149M/C447A, E145S/I246M, E145S/I246M/D252G/C347D/C447A, E145S/D252G/P348K/C447A, E145S/C277T/P348K/C447A, E145S/C347D/P348K/L445R/C447A/V491A, E145S/L445R/C447A, D146A/L149M/S151C/I246M/P348K, D146A/L149M/M242I/I246M/L445R, D146A/L149M/I246M/D252G/C447A, D146A/L149M/C277T/P348K/C447A, D146A/E198D/I246M/C277T, D146A/E198D/C277T/P348K/C447A, D146A/M242I, D146A/M242I/I246M/C277T/C347N/P348K/L445R/C447A, D146A/I246M/C277T/P348K/L445R/C447A, D146A/C277T, D146A/C277T/C347N/P348K, D146A/C277T/C347N/L445R/C447A, D146A/C277T/L445R/C447A, D146A/C347D/P348K/C447A, D146A/P348K, D146A/L445R/C447A, L149M, L149M/E198D/C277T/C347N/P348K, L149M/E198D/P348K, L149M/E198D/L445R, L149M/M242I/I246M, L149M/M242I/I246M/P348K/L445R, L149M/C347N/P348K/L445R/C447A, L149M/L445R, D184R, D184R/N284D, D184R/N284D/A429G, D184R/H386E, E198D/M242I/P348K, E198D/I246M, E198D/F250V, E198D/C277T/P348K/C447A, E198D/L445R, S205T, S205T/I246M/C347N, S205T/D252G/C347D/L445R/C447A, S205T/C347D/P348K/L445R/C447A, T218G, T218G/R260S/C338A, L219S, L219S/C338A/H418G, L219S/C421S, Y238R, Y238R/M242L/N284D, Y238R/N284D/H386E/A429G, Y238R/I332G/A429G, Y238R/C381A/A429G, Y238R/H386E, Y238R/A429G, M242I, M242I/C277T/C347D/P348K, M242I/P348K, M242I/L445R/C447A, M242L/N284D/C381A/A429G, I246M, I246M/C277T/P348K/C447A, I246M/L445R/C447A, R260S, R260S/C338G, R260S/C338G/H418G/C421S, C277T/C347N/P348K/L445R, C277T/C347N/C447A, N284D, N284D/I332G, N284D/H386E, N284D/H386E/A429G, L310S/C338S/H418G, L310S/H418G/C421S, I332G, I332G/H386E, I332G/A429G, C338G, C338G/H418G, C347N/P348K/L445R, C347N/P348K/C447A, P348K, P348K/L445R/C447A, P348K/C447A, H386E, H386E/A429G, H418G, A429G, and C447A.

[0163] In some embodiments, the engineered monoamine oxidase polypeptide comprises an amino acid sequence having at least 80%, 85%, 86%, 87%, 88%, 89%, 90%, 91%, 92%, 93%, 94%, 95%, 96%, 97%, 98%, 99% or more sequence identity to reference sequence SEQ ID NO: 6 and one or more residue differences as compared to SEQ ID NO: 6, selected from 80/429, 87/113/117/260/338/421, 87/421, 100/145/146/149/198/242/250/252/347/348/447, 100/145/149/198/242/277/347/348/447, 110/338/418, 145/149/205/246/250/252, 145/246/252/347/447, 145/252/348/447, 238/386/429, and 242/284/381/429. In some embodiments, the engineered monoamine oxidase comprises an amino acid sequence having at least 80%, 85%, 86%, 87%, 88%, 89%, 90%, 91%, 92%, 93%, 94%, 95%, 96%, 97%, 98%, 99% or more sequence identity to reference sequence SEQ ID NO: 6 and one or more residue differences as compared to SEQ ID NO: 6, selected from 80H/429G, 87L/113G/117K/260S/338S/421S, 87L/421S, 100P/145S/146A/149M/198D/242I/250V/252G/347N/348K/447A, 100P/145S/149M/198D/242I/277T/347N/348K/447A, 110N/338G/418G, 145G/149M/205T/246M/250V/252G, 145S/246M/252G/347D/447A, 145S/252G/348K/447A, 238R/386E/429G, and 242L/284D/381A/429G. In some embodiments, the engineered monoamine oxidase comprises an amino acid sequence having at least 80%, 85%, 86%, 87%, 88%, 89%, 90%, 91%, 92%, 93%, 94%, 95%, 96%, 97%, 98%, 99% or more sequence identity to reference sequence SEQ ID NO: 6 and one or more residue differences as compared to SEQ ID NO: 6, selected from S80H/A429G, P87L/N113G/P117K/R260S/C338S/C421S, P87L/C421S, S100P/E145S/D146A/L149M/E198D/M242I/F250V/D252G/C347N/P348K/C447A, S100P/E145S/L149M/E198D/M242I/C277T/C347N/P348K/C447A, K110N/C338G/H418G, E145G/L149M/S205T/I246M/F250V/D252G, E145S/I246M/D252G/C347D/C447A, E145S/D252G/P348K/C447A, Y238R/H386E/A429G, and M242L/N284D/C381A/A429G.

[0164] In some embodiments, the engineered monoamine oxidase polypeptide comprises an amino acid sequence having at least 80%, 85%, 86%, 87%, 88%, 89%, 90%, 91%, 92%, 93%, 94%, 95%, 96%, 97%, 98%, 99% or more sequence identity to reference sequence SEQ ID NO: 414 and one or more residue differences as compared to SEQ ID NO: 414, selected from 87/113/145/198/242/246/262/266, 87/117/149/242, 87/117/242/260/266, 87/145/149/198/447, 87/149/242/260/266, 87/149/260/262/266/381, 87/198, 87/242/246/260/262/266/338, 87/284/338/347, 113/117/146/149/260/262, 113/117/266/381, 113/117/447, 113/145/146/149/242/447, 113/242/347, 113/242/381, 117/145/146/262/284, 117/145/149/284/447, 117/149, 117/198, 117/198/262, 117/242/246/260/266/284/381, 117/242/260/262, 117/246/260/262/381, 117/246/284, 117/266, 145/146/149/260/262/338/347, 145/146/242/260/262/338/347/447, 145/149/198/260/266/338/347, 145/149/260/266/338/347/381/447, 146/149/260/262/347, 149/198/246/260/266/421, 198/447, 242, 242/246, 242/246/338/347, 242/260/262/338, 242/381, 246, 260/262/277/284/447, 260/266, 262, 347/381, and 447. In some embodiments, the engineered monoamine oxidase comprises an amino acid sequence having at least 80%, 85%, 86%, 87%, 88%, 89%, 90%, 91%, 92%, 93%, 94%, 95%, 96%, 97%, 98%, 99% or more sequence identity to reference sequence SEQ ID NO: 414 and one or more residue differences as compared to SEQ ID NO: 414, selected from 87G/113G/145L/198D/242I/246M/262F/266L, 87G/117K/149M/242I, 87G/145L/149M/198D/447A, 87G/149M/242I/260S/266L, 87L/117K/242I/260S/266L, 87L/149M/260S/262F/266L/381A, 87L/198D, 87L/242I/246M/260S/262F/266L/338G, 87L/284D/338G/347N, 113G/117K/146A/149M/260S/262F, 113G/117K/266L/381A, 113G/117K/447A, 113G/145L/146A/149M/242I/447A, 113G/242I/347N, 113G/242I/381A, 117K/145L/146A/262F/284D, 117K/145L/149M/284D/447A, 117K/149M, 117K/198D, 117K/198D/262F, 117K/242I/246M/260S/266L/284D/381A, 117K/242I/260S/262F, 117K/246M/260S/262F/381A, 117K/246M/284D, 117K/266L, 145L/146A/149M/260S/262F/338G/347N, 145L/146A/242I/260S/262F/338G/347N/447A, 145L/149M/198D/260S/266L/338G/347N, 145L/149M/260S/266L/338G/347N/381A/447A, 146A/149M/260S/262F/347N, 149M/198D/246M/260S/266L/421S, 198D/447A, 242I, 242I/246M, 242I/246M/338G/347N, 242I/260S/262F/338G, 242I/381A, 246M, 260S/262F/277T/284D/447A, 260S/266L, 262F, 347N/381A, and 447A. In some embodiments, the engineered monoamine oxidase comprises an amino acid sequence having at least 80%, 85%, 86%, 87%, 88%, 89%, 90%, 91%, 92%, 93%, 94%, 95%, 96%, 97%, 98%, 99% or more sequence identity to reference sequence SEQ ID NO: 414 and one or more residue differences as compared to SEQ ID NO: 414, selected from P87G/N113G/E145L/E198D/M242I/I246M/W262F/A266L, P87G/P117K/L149M/M242I, P87G/E145L/L149M/E198D/C447A, P87G/L149M/M242I/R260S/A266L, P87L/P117K/M242I/R260S/A266L, P87L/L149M/R260S/W262F/A266L/C381A, P87L/E198D, P87L/M242I/I246M/R260S/W262F/A266L/C338G, P87L/N284D/C338G/C347N, N113G/P117K/D146A/L149M/R260S/W262F, N113G/P117K/A266L/C381A, N113G/P117K/C447A, N113G/E145L/D146A/L149M/M242I/C447A, N113G/M242I/C347N, N113G/M242I/C381A, P117K/E145L/D146A/W262F/N284D, P117K/E145L/L149M/N284D/C447A, P117K/L149M, P117K/E198D, P117K/E198D/W262F, P117K/M242I/I246M/R260S/A266L/N284D/C381A, P117K/M242I/R260S/W262F, P117K/I246M/R260S/W262F/C381A, P117K/I246M/N284D, P117K/A266L, E145L/D146A/L149M/R260S/W262F/C338G/C347N, E145L/D146A/M242I/R260S/W262F/C338G/C347N/C447A, E145L/L149M/E198D/R260S/A266L/C338G/C347N, E145L/L149M/R260S/A266L/C338G/C347N/C381A/C447A, D146A/L149M/R260S/W262F/C347N, L149M/E198D/I246M/R260S/A266L/C421S, E198D/C447A, M242I, M242I/I246M, M242I/I246M/C338G/C347N, M242I/R260S/W262F/C338G, M242I/C381A, I246M, R260S/W262F/C277T/N284D/C447A, R260S/A266L, W262F, C347N/C381A, and C447A.

[0165] In some embodiments, the engineered monoamine oxidase polypeptide comprises an amino acid sequence having at least 80%, 85%, 86%, 87%, 88%, 89%, 90%, 91%, 92%, 93%, 94%, 95%, 96%, 97%, 98%, 99% or more sequence identity to reference sequence SEQ ID NO: 414 and one or more residue differences as compared to SEQ ID NO: 414, selected from 87/145/149/198/447, 87/149/260/262/266/381, 113/117/146/149/260/262, 117/145/149/284/447, 145/149/198/260/266/338/347, 146/149/260/262/347, and 149/198/246/260/266/421. In some embodiments, the engineered monoamine oxidase comprises an amino acid sequence having at least 80%, 85%, 86%, 87%, 88%, 89%, 90%, 91%, 92%, 93%, 94%, 95%, 96%, 97%, 98%, 99% or more sequence identity to reference sequence SEQ ID NO: 414 and one or more residue differences as compared to SEQ ID NO: 414, selected from 87G/145L/149M/198D/447A, 87L/149M/260S/262F/266L/381A, 113G/117K/146A/149M/260S/262F, 117K/145L/149M/284D/447A, 145L/149M/198D/260S/266L/338G/347N, 146A/149M/260S/262F/347N, and 149M/198D/246M/260S/266L/421S. In some embodiments, the engineered monoamine oxidase comprises an amino acid sequence having at least 80%, 85%, 86%, 87%, 88%, 89%, 90%, 91%, 92%, 93%, 94%, 95%, 96%, 97%, 98%, 99% or more sequence identity to reference sequence SEQ ID NO: 414 and one or more residue differences as compared to SEQ ID NO: 414, selected from P87G/E145L/L149M/E198D/C447A, P87L/L149M/R260S/W262F/A266L/C381A, N113G/P117K/D146A/L149M/R260S/W262F, P117K/E145L/L149M/N284D/C447A, E145L/L149M/E198D/R260S/A266L/C338G/C347N, D146A/L149M/R260S/W262F/C347N, and L149M/E198D/I246M/R260S/A266L/C421S.

[0166] As will be appreciated by the skilled artisan, in some embodiments, one or a combination of residue differences above that is selected can be kept constant (i.e., maintained) in the engineered monoamine oxidase as a core feature, and additional residue differences at other residue positions incorporated into the sequence to generate additional engineered monoamine oxidase polypeptides with improved properties. Accordingly, it is to be understood for any engineered monoamine oxidase containing one or a subset of the residue differences above, the present invention contemplates other engineered monoamine oxidases that comprise the one or subset of the residue differences, and additionally one or more residue differences at the other residue positions disclosed herein.

[0167] As noted above, the engineered monoamine oxidase polypeptides are also capable of converting substrates (e.g., Formula I or Compound 1) to products (e.g., Formula II or Compound 2). In some embodiments, the engineered monoamine oxidase polypeptide is capable of converting the substrate compounds to the product compound with at least 1.2 fold, 1.5 fold, 2 fold, 3 fold, 4 fold, 5 fold, 10 fold, 20 fold, 30 fold, 40 fold, 50 fold, 60 fold, 70 fold, 80 fold, 90 fold, 100 fold, or more activity relative to the activity of the reference polypeptide of SEQ ID NOs: 6 and/or 414.

[0168] In some embodiments, the engineered monoamine oxidase polypeptide capable of converting the substrate compounds to the product compounds with at least 2-fold the activity relative to SEQ ID NOs: 6 and/or 414, comprises an amino acid sequence selected from the even-numbered sequences in SEQ ID NOs: 6-1084.

[0169] In some embodiments, the engineered monoamine oxidase has an amino acid sequence comprising one or more residue differences as compared to SEQ ID NO: 6 or 414, increases expression of the engineered monoamine oxidase activity in a bacterial host cell, particularly in E. coli.

[0170] In some embodiments, the engineered monoamine oxidase has an amino acid sequence comprising one or more residue differences as compared to SEQ ID NO: 6 or 414, and decreases the enzyme loading necessary for conversion of a substrate to a product.

[0171] In some embodiments, the engineered monoamine oxidase has an amino acid sequence comprising one or more residue differences as compared to SEQ ID NO: 6 or 414, and decreases the enzyme loading necessary for conversion of a substrate to a product by about 10%, 25%, 33%, 50%, 75%, or more, as compared to a reference sequence of SEQ ID NO: 6 or 414.

[0172] In some embodiments, the engineered monoamine oxidase has an amino acid sequence comprising one or more residue differences as compared to SEQ ID NO: 6 or 414, wherein the enzyme loading of the engineered monoamine oxidase necessary for conversion of a substrate to a product is about 0.5% (w/w), 1% (w/w), 1.5% (w/w), 2% (w/w), 3% (w/w), 4% (w/w), 5% (w/w), 10% (w/w), or less of substrate compound loading.

[0173] In some embodiments, the engineered monoamine oxidase polypeptide with improved properties has an amino acid sequence comprising a sequence selected from the even-numbered sequences in the range of SEQ ID NOs: 6-1084.

[0174] In some embodiments, the engineered monoamine oxidase, comprises an amino acid sequence having at least 80%, 85%, 86%, 87%, 88%, 89%, 90%, 91%, 92%, 93%, 94%, 95%, 96%, 97%, 98%, or 99% identity to one of the even-numbered sequences in the range of SEQ ID NOs: 6-1084, and the amino acid residue differences as compared to SEQ ID NO: 6 or 414, present in any one of the even-numbered sequences in the range of SEQ ID NOs: 6-1084, as provided in the Examples.

[0175] In some embodiments, an engineered monoamine oxidase polypeptide of the disclosure comprises an amino acid sequence that is at least about 85%, 86%, 87%, 88%, 89%, 90%, 91%, 92%, 93%, 94%, 95%, 96%, 97%, 98%, or 99% identical to a reference sequence of SEQ ID NO: 6 or 414, wherein the polypeptide comprises an amino acid sequence where the amino acid residue corresponding to residue position 429 is glycine, wherein the residues are numbered with reference to the amino acid sequence of SEQ ID NO: 6 or 414. The modifications can include substitutions, deletions, and insertions. The substitutions can be non-conservative substitutions, conservative substitutions, or a combination of non-conservative and conservative substitutions.

[0176] In some embodiments, an engineered monoamine oxidase polypeptide of the disclosure comprises an amino acid sequence that is at least about 85%, 86%, 87%, 88%, 89%, 90%, 91%, 92%, 93%, 94%, 95%, 96%, 97%, 98%, or 99% identical to a reference sequence of SEQ ID NO: 6 or 414, wherein the polypeptide comprises an amino acid sequence where the amino acid residue corresponding to residue position 347 is cysteine or asparagine and the amino acid residue corresponding to residue position 429 is glycine, wherein the residues are numbered with reference to the amino acid sequence of SEQ ID NO: 6 or 414. The modifications can include substitutions, deletions, and insertions. The substitutions can be non-conservative substitutions, conservative substitutions, or a combination of non-conservative and conservative substitutions.

[0177] In some embodiments, an engineered monoamine oxidase polypeptide of the disclosure comprises an amino acid sequence that is at least about 85%, 86%, 87%, 88%, 89%, 90%, 91%, 92%, 93%, 94%, 95%, 96%, 97%, 98%, or 99% identical to a reference sequence of SEQ ID NO: 6 or 414, wherein the polypeptide comprises an amino acid sequence where the amino acid residue corresponding to residue position 421 is cysteine, the amino acid residue corresponding to residue position 347 is cysteine or asparagine, and the amino acid residue corresponding to residue position 429 is glycine, wherein the residues are numbered with reference to the amino acid sequence of SEQ ID NO: 6 or 414. The modifications can include substitutions, deletions, and insertions. The substitutions can be non-conservative substitutions, conservative substitutions, or a combination of non-conservative and conservative substitutions.

[0178] In some embodiments, an engineered monoamine oxidase polypeptide of the disclosure comprises an amino acid sequence that is at least about 85%, 86%, 87%, 88%, 89%, 90%, 91%, 92%, 93%, 94%, 95%, 96%, 97%, 98%, or 99% identical to a reference sequence of SEQ ID NO: 6 or 414, wherein the polypeptide comprises an amino acid sequence where the amino acid residue corresponding to residue position 145 is leucine, the amino acid residue corresponding to residue position 149 is methionine, the amino acid residue corresponding to residue position 198 is aspartic acid, the amino acid residue corresponding to residue position 260 is serine, the amino acid residue corresponding to residue position 266 is leucine, the amino acid residue corresponding to residue position 338 is glycine, the amino acid residue corresponding to residue position 347 is asparagine, and the amino acid residue corresponding to residue position 429 is glycine, wherein the residues are numbered with reference to the amino acid sequence of SEQ ID NO: 6 or 414. The modifications can include substitutions, deletions, and insertions.

[0179] The substitutions can be non-conservative substitutions, conservative substitutions, or a combination of non-conservative and conservative substitutions.

[0180] In some embodiments, an engineered monoamine oxidase polypeptide of the disclosure comprises an amino acid sequence that is at least about 85%, 86%, 87%, 88%, 89%, 90%, 91%, 92%, 93%, 94%, 95%, 96%, 97%, 98%, or 99 identical to a reference sequence of SEQ ID NO: 6 or 414, wherein the polypeptide comprises an amino acid sequence where the amino acid residue corresponding to residue position 87 is leucine, the amino acid residue corresponding to residue position 113 is glycine, the amino acid residue corresponding to residue position 117 is lysine, the amino acid residue corresponding to residue position 260 is serine, the amino acid residue corresponding to residue position 338 is serine, and the amino acid residue corresponding to residue position 421 is serine, wherein the residues are numbered with reference to the amino acid sequence of SEQ ID NO: 6 or 414. The modifications can include substitutions, deletions, and insertions. The substitutions can be non-conservative substitutions, conservative substitutions, or a combination of non-conservative and conservative substitutions.

[0181] In addition to the residue positions specified above, any of the engineered monoamine oxidase polypeptides disclosed herein can further comprise other residue differences relative to SEQ ID NOs: 6 and/or 414, at other residue positions (i.e., residue positions other than those included herein). Residue differences at these other residue positions can provide for additional variations in the amino acid sequence without adversely affecting the ability of the polypeptide to carry out the conversion of substrate to product. Accordingly, in some embodiments, in addition to the amino acid residue differences present in any one of the engineered monoamine oxidase polypeptides selected from the even-numbered sequences in the range of SEQ ID NOs: 6-1084, the sequence can further comprise 1-2, 1-3, 1-4, 1-5, 1-6, 1-7, 1-8, 1-9, 1-10, 1-11, 1-12, 1-14, 1-15, 1-16, 1-18, 1-20, 1-22, 1-24, 1-26, 1-30, 1-35, 1-40, 1-45, or 1-50 residue differences at other amino acid residue positions as compared to SEQ ID NOs: 6 and/or 414.

[0182] In some embodiments, the number of amino acid residue differences as compared to the reference sequence can be 1, 2, 3, 4, 5, 6, 7, 8, 9, 10, 11, 12, 13, 14, 15, 16, 17, 18, 19, 20, 21, 22, 23, 24, 25, 30, 30, 35, 40, 45 or 50 residue positions. In some embodiments, the number of amino acid residue differences as compared to the reference sequence can be 1, 2, 3, 4, 5, 6, 7, 8, 9, 10, 11, 12, 13, 14, 15, 16, 18, 20, 21, 22, 23, 24, or 25 residue positions. The residue differences at these other positions can be conservative changes or non-conservative changes. In some embodiments, the residue differences can comprise conservative substitutions and non-conservative substitutions as compared to the monoamine oxidase polypeptide of SEQ ID NO: 6 or 414.

[0183] In some embodiments, the present invention also provides engineered polypeptides that comprise a fragment of any of the engineered monoamine oxidase polypeptides described herein that retains the functional activity and/or improved property of that engineered monoamine oxidase. Accordingly, in some embodiments, the present invention provides a polypeptide fragment capable of converting substrate to product under suitable reaction conditions, wherein the fragment comprises at least about 90%, 95%, 96%, 97%, 98%, or 99% of a full-length amino acid sequence of an engineered monoamine oxidase of the present invention, such as an exemplary engineered monoamine oxidase polypeptide selected from the even-numbered sequences in the range of SEQ ID NOs: 6-1084. In some embodiments, the engineered monoamine oxidase can have an amino acid sequence comprising a deletion in any one of the monoamine oxidase polypeptide sequences described herein, such as the exemplary engineered polypeptides of the even-numbered sequences in the range of SEQ ID NOs: 6-1084.

[0184] Thus, for each and every embodiment of the engineered monoamine oxidase polypeptides of the invention, the amino acid sequence can comprise deletions of one or more amino acids, 2 or more amino acids, 3 or more amino acids, 4 or more amino acids, 5 or more amino acids, 6 or more amino acids, 8 or more amino acids, 10 or more amino acids, 15 or more amino acids, or 20 or more amino acids, up to 10% of the total number of amino acids, up to 20% of the total number of amino acids, or up to 30% of the total number of amino acids of the monoamine oxidase polypeptides, where the associated functional activity and/or improved properties of the engineered monoamine oxidase described herein are maintained. In some embodiments, the deletions can comprise 1-2, 1-3, 1-4, 1-5, 1-6, 1-7, 1-8, 1-9, 1-10, 1-15, 1-20, 1-21, 1-22, 1-23, 1-24, 1-25, 1-30, 1-35, 1-40, 1-45, or 1-50 amino acid residues. In some embodiments, the number of deletions can be 1, 2, 3, 4, 5, 6, 7, 8, 9, 10, 11, 12, 13, 14, 15, 16, 17, 18, 19, 20, 21, 22, 23, 24, 25, 30, 30, 35, 40, 45, or 50 amino acid residues. In some embodiments, the deletions can comprise deletions of 1, 2, 3, 4, 5, 6, 7, 8, 9, 10, 11, 12, 13, 14, 15, 16, 18, 20, 21, 22, 23, 24, or 25 amino acid residues.

[0185] In some embodiments, the engineered monoamine oxidase polypeptide described herein can have an amino acid sequence comprising an insertion as compared to any one of the engineered monoamine oxidase polypeptides described herein, such as the exemplary engineered polypeptides of the even-numbered sequences in the range of SEQ ID NOs: 6-1084. Thus, for each and every embodiment of the monoamine oxidase polypeptides of the disclosure, the insertions can comprise one or more amino acids, 2 or more amino acids, 3 or more amino acids, 4 or more amino acids, 5 or more amino acids, 6 or more amino acids, 8 or more amino acids, 10 or more amino acids, 15 or more amino acids, 20 or more amino acids, 30 or more amino acids, 40 or more amino acids, or 50 or more amino acids, where the associated functional activity and/or improved properties of the engineered monoamine oxidase described herein is maintained. The insertions can be to amino or carboxy terminus, or internal portions of the monoamine oxidase polypeptide.

[0186] In some embodiments, the engineered monoamine oxidase herein can have an amino acid sequence comprising a sequence selected from the even-numbered sequences in the range of SEQ ID NOs: 6-1084, and optionally one or several (e.g., up to 3, 4, 5, or up to 10) amino acid residue deletions, insertions and/or substitutions. In some embodiments, the amino acid sequence has optionally 1-2, 1-3, 1-4, 1-5, 1-6, 1-7, 1-8, 1-9, 1-10, 1-15, 1-20, 1-21, 1-22, 1-23, 1-24, 1-25, 1-30, 1-35, 1-40, 1-45, or 1-50 amino acid residue deletions, insertions and/or substitutions. In some embodiments, the number of amino acid sequence has optionally 1, 2, 3, 4, 5, 6, 7, 8, 9, 10, 11, 12, 13, 14, 15, 16, 17, 18, 19, 20, 21, 22, 23, 24, 25, 30, 30, 35, 40, 45, or 50 amino acid residue deletions, insertions and/or substitutions. In some embodiments, the amino acid sequence has optionally 1, 2, 3, 4, 5, 6, 7, 8, 9, 10, 11, 12, 13, 14, 15, 16, 18, 20, 21, 22, 23, 24, or 25 amino acid residue deletions, insertions and/or substitutions. In some embodiments, the substitutions can be conservative or non-conservative substitutions.

[0187] In the above embodiments, the suitable reaction conditions for the engineered polypeptides are provided in the Examples herein.

[0188] In some embodiments, the polypeptides of the present invention are fusion polypeptides in which the engineered polypeptides are fused to other polypeptides, such as, by way of example and not limitation, antibody tags (e.g., myc epitope), purification sequences (e.g., His tags for binding to metals), and cell localization signals (e.g., secretion signals). Thus, the engineered polypeptides described herein can be used with or without fusions to other polypeptides.

[0189] It is to be understood that the polypeptides described herein are not restricted to the genetically encoded amino acids. In addition to the genetically encoded amino acids, the polypeptides described herein may be comprised, either in whole or in part, of naturally occurring and/or synthetic non-encoded amino acids. Certain commonly encountered non-encoded amino acids of which the polypeptides described herein may be comprised include, but are not limited to: the D-stereomers of the genetically-encoded amino acids; 2,3-diaminopropionic acid (Dpr); α-aminoisobutyric acid (Aib); ε-aminohexanoic acid (Aha); 8-aminovaleric acid (Ava); N-methylglycine or sarcosine (MeGly or Sar); ornithine (Orn); citrulline (Cit); t-butylalanine (Bua); t-butylglycine (Bug); N-methylisoleucine (MeIle); phenylglycine (Phg); cyclohexylalanine (Cha); norleucine (Nle); naphthylalanine (Nal); 2-chlorophenylalanine (Ocf); 3-chlorophenylalanine (Mcf); 4-chlorophenylalanine (Pcf); 2-fluorophenylalanine (Off); 3-fluorophenylalanine (Mff); 4-fluorophenylalanine (Pff); 2-bromophenylalanine (Obf); 3-bromophenylalanine (Mbf); 4-bromophenylalanine (Pbf); 2-methylphenylalanine (Omf); 3-methylphenylalanine (Mmf); 4-methylphenylalanine (Pmf); 2-nitrophenylalanine (Onf); 3-nitrophenylalanine (Mnf); 4-nitrophenylalanine (Pnf); 2-cyanophenylalanine (Ocf); 3-cyanophenylalanine (Mcf); 4-cyanophenylalanine (Pcf); 2-trifluoromethylphenylalanine (Otf); 3-trifluoromethylphenylalanine (Mtf); 4-trifluoromethylphenylalanine (Ptf); 4-aminophenylalanine (Paf); 4-iodophenylalanine (Pif); 4-aminomethylphenylalanine (Pamf); 2,4-dichlorophenylalanine (Opef); 3,4-dichlorophenylalanine (Mpcf); 2,4-difluorophenylalanine (Opff); 3,4-difluorophenylalanine (Mpff); pyrid-2-ylalanine (2pAla); pyrid-3-ylalanine (3pAla); pyrid-4-ylalanine (4pAla); naphth-1-ylalanine (1nAla); naphth-2-ylalanine (2nAla); thiazolylalanine (taAla); benzothienylalanine (bAla); thienylalanine (tAla); furylalanine (fAla); homophenylalanine (hPhe); homotyrosine (hTyr); homotryptophan (hTrp); pentafluorophenylalanine (5ff); styrylkalanine (sAla); authrylalanine (aAla); 3,3-diphenylalanine (Dfa); 3-amino-5-phenypentanoic acid (Afp); penicillamine (Pen); 1,2,3,4-tetrahydroisoquinoline-3-carboxylic acid (Tic); β-2-thienylalanine (Thi); methionine sulfoxide (Mso); N(w)-nitroarginine (nArg); homolysine (hLys); phosphonomethylphenylalanine (pmPhe); phosphoserine (pSer); phosphothreonine (pThr); homoaspartic acid (hAsp); homoglutanic acid (hGlu); 1-aminocyclopent-(2 or 3)-ene-4 carboxylic acid; pipecolic acid (PA), azetidine-3-carboxylic acid (ACA); 1-aminocyclopentane-3-carboxylic acid; allylglycine (aGly); propargylglycine (pgGly); homoalanine (hAla); norvaline (nVal); homoleucine (hLeu), homovaline (hVal); homoisoleucine (hIle); homoarginine (hArg); N-acetyl lysine (AcLys); 2,4-diaminobutyric acid (Dbu); 2,3-diaminobutyric acid (Dab); N-methylvaline (MeVal); homocysteine (hCys); homoserine (hSer); hydroxyproline (Hyp) and homoproline (hPro). Additional non-encoded amino acids of which the polypeptides described herein may be comprised will be apparent to those of skill in the art (See e.g., the various amino acids provided in Fasman, CRC Practical Handbook of Biochemistry and Molecular Biology, CRC Press, Boca Raton, FL, pp. 3-70 [1989], and the references cited therein, all of which are incorporated by reference). These amino acids may be in either the L- or D-configuration.

[0190] Those of skill in the art will recognize that amino acids or residues bearing side chain protecting groups may also comprise the polypeptides described herein. Non-limiting examples of such protected amino acids, which in this case belong to the aromatic category, include (protecting groups listed in parentheses), but are not limited to: Arg(tos), Cys(methylbenzyl), Cys (nitropyridinesulfenyl), Glu(8-benzylester), Gln(xanthyl), Asn(N-8-xanthyl), His(bom), His(benzyl), His(tos), Lys(fmoc), Lys(tos), Ser(O-benzyl), Thr (O-benzyl) and Tyr(O-benzyl).

[0191] Non-encoding amino acids that are conformationally constrained of which the polypeptides described herein may be composed include, but are not limited to, N-methyl amino acids (L-configuration); 1-aminocyclopent-(2 or 3)-ene-4-carboxylic acid; pipecolic acid; azetidine-3-carboxylic acid; homoproline (hPro); and 1-aminocyclopentane-3-carboxylic acid.

[0192] In some embodiments, the engineered polypeptides can be in various forms, for example, such as an isolated preparation, as a substantially purified enzyme, whole cells transformed with gene(s) encoding the enzyme, and/or as cell extracts and/or lysates of such cells. The enzymes can be lyophilized, spray-dried, precipitated or be in the form of a crude paste, as further discussed below.

[0193] In some embodiments, the engineered polypeptides can be in the form of a biocatalytic composition. In some embodiments, the biocatalytic composition comprises (a) a means for conversion of a fused bicyclic proline analogue compound of Formula I to a corresponding imine of Formula II by contact with a monoamine oxidase polypeptide and (b) a suitable cofactor in the presence of oxygen. In some embodiments, the biocatalytic composition comprises a FAD cofactor. In some embodiments, the biocatalytic composition comprises catalase. In some embodiments, the composition further comprises NaHSO₃. In some embodiments, the composition further comprises HCN.

[0194] In some embodiments, the engineered polypeptides can be provided on a solid support, such as a membrane, resin, solid carrier, or other solid phase material. A solid support can be composed of organic polymers such as polystyrene, polyethylene, polypropylene, polyfluoroethylene, polyethyleneoxy, and polyacrylamide, as well as co-polymers and grafts thereof. A solid support can also be inorganic, such as glass, silica, controlled pore glass (CPG), reverse phase silica or metal, such as gold or platinum. The configuration of a solid support can be in the form of beads, spheres, particles, granules, a gel, a membrane or a surface. Surfaces can be planar, substantially planar, or non-planar. Solid supports can be porous or non-porous, and can have swelling or non-swelling characteristics. A solid support can be configured in the form of a well, depression, or other container, vessel, feature, or location.

[0195] In some embodiments, the engineered monoamine oxidase polypeptides of the present invention can be immobilized on a solid support such that they retain their improved activity, and/or other improved properties relative to the reference polypeptide of SEQ ID NO: 6 or 414. In such embodiments, the immobilized polypeptides can facilitate the biocatalytic conversion of the substrate compounds or other suitable substrates to the product and after the reaction is complete are easily retained (e.g., by retaining beads on which polypeptide is immobilized) and then reused or recycled in subsequent reactions. Such immobilized enzyme processes allow for further efficiency and cost reduction. Accordingly, it is further contemplated that any of the methods of using the monoamine oxidase polypeptides of the present invention can be carried out using the monoamine oxidase polypeptides bound or immobilized on a solid support.

[0196] Methods of enzyme immobilization are well-known in the art. The engineered polypeptides can be bound non-covalently or covalently. Various methods for conjugation and immobilization of enzymes to solid supports (e.g., resins, membranes, beads, glass, etc.) are well known in the art (See e.g., Yi et al., Proc. Biochem., 42(5): 895-898 [2007]; Martin et al., Appl. Microbiol. Biotechnol., 76(4): 843-851 [2007]; Koszelewski et al., J. Mol. Cat. B: Enzymatic, 63: 39-44 [2010]; Truppo et al., Org. Proc. Res. Dev., published online: dx.doi.org/10.1021/op200157c; Hermanson, Bioconjugate Techniques, 2^{nd} ed., Academic Press, Cambridge, MA [2008]; Mateo et al., Biotechnol. Prog., 18(3):629-34 [2002]; and “Bioconjugation Protocols: Strategies and Methods,” In Methods in Molecular Biology, Niemeyer (ed.), Humana Press, New York, NY [2004]; the disclosures of each which are incorporated by reference herein). Solid supports useful for immobilizing the engineered monoamine oxidase of the present invention include but are not limited to beads or resins comprising polymethacrylate with epoxide functional groups, polymethacrylate with amino epoxide functional groups, styrene/DVB copolymer or polymethacrylate with octadecyl functional groups. Exemplary solid supports useful for immobilizing the engineered monoamine oxidase polypeptides of the present invention include, but are not limited to, chitosan beads, Eupergit C, and SEPABEADs (Mitsubishi), including the following different types of SEPABEAD: EC-EP, EC-HFA/S, EXA252, EXE119 and EXE120.

[0197] In some embodiments, the polypeptides described herein are provided in the form of kits. The enzymes in the kits may be present individually or as a plurality of enzymes. The kits can further include reagents for carrying out the enzymatic reactions, substrates for assessing the activity of enzymes, as well as reagents for detecting the products. The kits can also include reagent dispensers and instructions for use of the kits.

[0198] In some embodiments, the kits of the present invention include arrays comprising a plurality of different monoamine oxidase polypeptides at different addressable position, wherein the different polypeptides are different variants of a reference sequence each having at least one different improved enzyme property. In some embodiments, a plurality of polypeptides immobilized on solid supports are configured on an array at various locations, addressable for robotic delivery of reagents, or by detection methods and/or instruments. The array can be used to test a variety of substrate compounds for conversion by the polypeptides. Such arrays comprising a plurality of engineered polypeptides and methods of their use are known in the art (See e.g., WO2009/008908A2).

### Polynucleotides Encoding Engineered Monoamine Oxidases, Expression Vectors and Host Cells

[0199] In another aspect, the present invention provides polynucleotides encoding the engineered monoamine oxidase polypeptides described herein. The polynucleotides may be operatively linked to one or more heterologous regulatory sequences that control gene expression to create a recombinant polynucleotide capable of expressing the polypeptide. Expression constructs containing a heterologous polynucleotide encoding the engineered monoamine oxidase are introduced into appropriate host cells to express the corresponding monoamine oxidase polypeptide.

[0200] As will be apparent to the skilled artisan, availability of a protein sequence and the knowledge of the codons corresponding to the various amino acids provide a description of all the polynucleotides capable of encoding the subject polypeptides. The degeneracy of the genetic code, where the same amino acids are encoded by alternative or synonymous codons, allows an extremely large number of nucleic acids to be made, all of which encode the improved monoamine oxidase enzymes. Thus, having knowledge of a particular amino acid sequence, those skilled in the art could make any number of different nucleic acids by simply modifying the sequence of one or more codons in a way which does not change the amino acid sequence of the protein. In this regard, the present invention specifically contemplates each and every possible variation of polynucleotides that could be made encoding the polypeptides described herein by selecting combinations based on the possible codon choices, and all such variations are to be considered specifically disclosed for any polypeptide described herein, including the amino acid sequences presented in Tables 4.2, 5.1, 6.1, 7.1, 8.1, and 9.1, and disclosed in the sequence listing incorporated by reference herein as the even-numbered sequences in the range of SEQ ID NOs: 6-1084.

[0201] In various embodiments, the codons are preferably selected to fit the host cell in which the protein is being produced. For example, preferred codons used in bacteria are used to express the gene in bacteria; preferred codons used in yeast are used for expression in yeast; and preferred codons used in mammals are used for expression in mammalian cells. In some embodiments, all codons need not be replaced to optimize the codon usage of the monoamine oxidase since the natural sequence will comprise preferred codons and because use of preferred codons may not be required for all amino acid residues.

[0202] Consequently, codon optimized polynucleotides encoding the monoamine oxidase enzymes may contain preferred codons at about 40%, 50%, 60%, 70%, 80%, or greater than 90% of codon positions of the full length coding region.

[0203] In some embodiments, the polynucleotide comprises a codon optimized nucleotide sequence encoding the monoamine oxidase polypeptide amino acid sequence, as represented by SEQ ID NOs: 5 and/or 413. In some embodiments, the polynucleotide has a nucleic acid sequence comprising at least 80%, 85%, 90%, 91%, 92%, 93%, 94%, 95%, 96%, 97%, 98%, 99% or more identity to the codon optimized nucleic acid sequences encoding the even-numbered sequences in the range of SEQ ID NOs: 6-1084. In some embodiments, the polynucleotide has a nucleic acid sequence comprising at least 80%, 85%, 90%, 91%, 92%, 93%, 94%, 95%, 96%, 97%, 98%, 99% or more identity to the codon optimized nucleic acid sequences in the odd-numbered sequences in the range of SEQ ID NOs: 5-1083. In some embodiments, the codon optimized sequences of the odd-numbered sequences in the range of SEQ ID NOs: 5-1083, enhance expression of the encoded monoamine oxidase, providing preparations of enzyme capable of converting substrate to product.

[0204] In some embodiments, the polynucleotides are capable of hybridizing under highly stringent conditions to a reference sequence selected from the odd-numbered sequences in SEQ ID NOs: 5-1083, or a complement thereof, and encode a monoamine oxidase polypeptide.

[0205] In some embodiments, as described above, the polynucleotide encodes an engineered monoamine oxidase polypeptide with improved properties as compared to SEQ ID NO: 6 or 414, wherein the polypeptide comprises an amino acid sequence having at least 80%, 85%, 86%, 87%, 88%, 89%, 90%, 91%, 92%, 93%, 94%, 95%, 96%, 97%, 98%, 99% or more identity to a reference sequence selected from SEQ ID NO: 6 or 414, and one or more residue differences as compared to SEQ ID NO: 6 or 414, wherein the sequence is selected from the even-numbered sequences in the range of SEQ ID NOs: 6-1084. In some embodiments, the reference amino acid sequence is selected from the even-numbered sequences in the range of SEQ ID NOs: 6-1084. In some embodiments, the reference amino acid sequence is SEQ ID NO: 6, while in some other embodiments, the reference sequence is SEQ ID NO: 414.

[0206] In some embodiments, the polynucleotide encodes a monoamine oxidase polypeptide capable of converting one or more substrates to product with improved properties as compared to SEQ ID NO: 6 or 414, wherein the polypeptide comprises an amino acid sequence having at least 80%, 85%, 86%, 87%, 88%, 89%, 90%, 91%, 92%, 93%, 94%, 95%, 96%, 97%, 98%, 99% or more sequence identity to reference sequence SEQ ID NO: 6 or 414.

[0207] In some embodiments, the polynucleotide encoding the engineered monoamine oxidase comprises a polynucleotide sequence selected from the odd-numbered sequences in the range of SEQ ID NOs: 5-1083.

[0208] In some embodiments, the polynucleotides are capable of hybridizing under highly stringent conditions to a reference polynucleotide sequence selected from the odd-numbered sequences in the range of SEQ ID NOs: 5-1083, or a complement thereof, and encode a monoamine oxidase polypeptide with one or more of the improved properties described herein. In some embodiments, the polynucleotide capable of hybridizing under highly stringent conditions encodes a monoamine oxidase comprising an amino acid sequence having at least 80%, 85%, 86%, 87%, 88%, 89%, 90%, 91%, 92%, 93%, 94%, 95%, 96%, 97%, 98%, 99% or more identity to any of the even-numbered sequences of SEQ ID NOs: 6-1084, that has an amino acid sequence comprising one or more residue differences as compared to SEQ ID NOs: 6 and/or 414.

[0209] In some embodiments, the polynucleotide capable of hybridizing under highly stringent conditions encodes an engineered monoamine oxidase with improved properties comprising an amino acid sequence having at least 80%, 85%, 86%, 87%, 88%, 89%, 90%, 91%, 92%, 93%, 94%, 95%, 96%, 97%, 98%, 99% or more identity to SEQ ID NO: 6 or 414. In some embodiments, the polynucleotides encode the polypeptides described herein but have at least about 80%, 85%, 86%, 87%, 88%, 89%, 90%, 91%, 92%, 93%, 94%, 95%, 96%, 97%, 98%, or 99% or more sequence identity at the nucleotide level to a reference polynucleotide encoding the engineered monoamine oxidase. In some embodiments, the reference polynucleotide sequence is selected from SEQ ID NOs: 5-1083.

[0210] In some embodiments, the polynucleotide capable of hybridizing under highly stringent conditions encodes an engineered monoamine oxidase polypeptide with improved properties comprising an amino acid sequence having at least 80%, 85%, 86%, 87%, 88%, 89%, 90%, 91%, 92%, 93%, 94%, 95%, 96%, 97%, 98%, 99% or more identity to SEQ ID NO: 6. In some embodiments, the polynucleotides encode the polypeptides described herein but have at least about 80%, 85%, 86%, 87%, 88%, 89%, 90%, 91%, 92%, 93%, 94%, 95%, 96%, 97%, 98%, or 99% or more sequence identity at the nucleotide level to a reference polynucleotide encoding the engineered monoamine oxidase. In some embodiments, the reference polynucleotide sequence is selected from SEQ ID NOs: 5-993.

[0211] In some embodiments, the polynucleotide capable of hybridizing under highly stringent conditions encodes an engineered monoamine oxidase polypeptide with improved properties comprising an amino acid sequence having at least 80%, 85%, 86%, 87%, 88%, 89%, 90%, 91%, 92%, 93%, 94%, 95%, 96%, 97%, 98%, 99% or more identity to SEQ ID NO: 414. In some embodiments, the polynucleotides encode the polypeptides described herein but have at least about 80%, 85%, 86%, 87%, 88%, 89%, 90%, 91%, 92%, 93%, 94%, 95%, 96%, 97%, 98%, or 99% or more sequence identity at the nucleotide level to a reference polynucleotide encoding the engineered monoamine oxidase. In some embodiments, the reference polynucleotide sequence is selected from SEQ ID NOs: 995-1083.

[0212] In some embodiments, an isolated polynucleotide encoding any of the engineered monoamine oxidase polypeptides provided herein is manipulated in a variety of ways to provide for expression of the polypeptide. In some embodiments, the polynucleotides encoding the polypeptides are provided as expression vectors where one or more control sequences is present to regulate the expression of the polynucleotides and/or polypeptides. Manipulation of the isolated polynucleotide prior to its insertion into a vector may be desirable or necessary depending on the expression vector. The techniques for modifying polynucleotides and nucleic acid sequences utilizing recombinant DNA methods are well known in the art.

[0213] In some embodiments, the control sequences include among other sequences, promoters, leader sequences, polyadenylation sequences, propeptide sequences, signal peptide sequences, and transcription terminators. As known in the art, suitable promoters can be selected based on the host cells used. For bacterial host cells, suitable promoters for directing transcription of the nucleic acid constructs of the present application, include, but are not limited to the promoters obtained from the E. coli lac operon, Streptomyces coelicolor agarase gene (dagA), Bacillus subtilis levansucrase gene (sacB), Bacillus licheniformis alpha-amylase gene (amyL), Bacillus stearothermophilus maltogenic amylase gene (amyM), Bacillus amyloliquefaciens alpha-amylase gene (amyQ), Bacillus licheniformis penicillinase gene (penP), Bacillus subtilis xylA and xylB genes, and prokaryotic beta-lactamase gene (See e.g., Villa-Kamaroff et al., Proc. Natl Acad. Sci. USA 75: 3727-3731 [1978]), as well as the tac promoter (See e.g., DeBoer et al., Proc. Natl Acad. Sci. USA 80: 21-25 [1983]). Exemplary promoters for filamentous fungal host cells, include promoters obtained from the genes for Aspergillus oryzae TAKA amylase, Rhizomucor miehei aspartic proteinase, Aspergillus niger neutral alpha-amylase, Aspergillus niger acid stable alpha-amylase, Aspergillus niger or Aspergillus awamori glucoamylase (glaA), Rhizomucor miehei lipase, Aspergillus oryzae alkaline protease, Aspergillus oryzae triose phosphate isomerase, Aspergillus nidulans acetamidase, and Fusarium oxysporum trypsin-like protease (See e.g., WO 96/00787), as well as the NA2-tpi promoter (a hybrid of the promoters from the genes for Aspergillus niger neutral alpha-amylase and Aspergillus oryzae triose phosphate isomerase), and mutant, truncated, and hybrid promoters thereof.

[0214] Exemplary yeast cell promoters can be from the genes can be from the genes for Saccharomyces cerevisiae enolase (ENO-1), Saccharomyces cerevisiae galactokinase (GAL1), Saccharomyces cerevisiae alcohol dehydrogenase/glyceraldehyde-3-phosphate dehydrogenase (ADH2/GAP), and Saccharomyces cerevisiae 3-phosphoglycerate kinase. Other useful promoters for yeast host cells are known in the art (See e.g., Romanos et al., Yeast 8:423-488 [1992]).

[0215] In some embodiments, the control sequence is a suitable transcription terminator sequence, a sequence recognized by a host cell to terminate transcription. The terminator sequence is operably linked to the 3′ terminus of the nucleic acid sequence encoding the polypeptide. Any terminator which is functional in the host cell of choice finds use in the present invention. For example, exemplary transcription terminators for filamentous fungal host cells can be obtained from the genes for Aspergillus oryzae TAKA amylase, Aspergillus niger glucoamylase, Aspergillus nidulans anthranilate synthase, Aspergillus niger alpha-glucosidase, and Fusarium oxysporum trypsin-like protease. Exemplary terminators for yeast host cells can be obtained from the genes for Saccharomyces cerevisiae enolase, Saccharomyces cerevisiae cytochrome C (CYC1), and Saccharomyces cerevisiae glyceraldehyde-3-phosphate dehydrogenase. Other useful terminators for yeast host cells are known in the art (See e.g., Romanos et al., supra).

[0216] In some embodiments, the control sequence is a suitable leader sequence, a non-translated region of an mRNA that is important for translation by the host cell. The leader sequence is operably linked to the 5′ terminus of the nucleic acid sequence encoding the polypeptide. Any leader sequence that is functional in the host cell of choice may be used. Exemplary leaders for filamentous fungal host cells are obtained from the genes for Aspergillus oryzae TAKA amylase and Aspergillus nidulans triose phosphate isomerase. Suitable leaders for yeast host cells include, but are not limited to those obtained from the genes for Saccharomyces cerevisiae enolase (ENO-1), Saccharomyces cerevisiae 3-phosphoglycerate kinase, Saccharomyces cerevisiae alpha-factor, and Saccharomyces cerevisiae alcohol dehydrogenase/glyceraldehyde-3-phosphate dehydrogenase (ADH2/GAP). The control sequence may also be a polyadenylation sequence, a sequence operably linked to the 3′ terminus of the nucleic acid sequence and which, when transcribed, is recognized by the host cell as a signal to add polyadenosine residues to transcribed mRNA. Any polyadenylation sequence which is functional in the host cell of choice may be used in the present invention. Exemplary polyadenylation sequences for filamentous fungal host cells include, but are not limited to those from the genes for Aspergillus oryzae TAKA amylase, Aspergillus niger glucoamylase, Aspergillus nidulans anthranilate synthase, Fusarium oxysporum trypsin-like protease, and Aspergillus niger alpha-glucosidase. Useful polyadenylation sequences for yeast host cells are also known in the art (See e.g., Guo and Sherman, Mol. Cell. Bio., 15:5983-5990 [1995]).

[0217] In some embodiments, the control sequence is a signal peptide coding region that codes for an amino acid sequence linked to the amino terminus of a polypeptide and directs the encoded polypeptide into the cell's secretory pathway. The 5′ end of the coding sequence of the nucleic acid sequence may inherently contain a signal peptide coding region naturally linked in translation reading frame with the segment of the coding region that encodes the secreted polypeptide. Alternatively, the 5′ end of the coding sequence may contain a signal peptide coding region that is foreign to the coding sequence. Any signal peptide coding region that directs the expressed polypeptide into the secretory pathway of a host cell of choice finds use for expression of the engineered monoamine oxidase polypeptides provided herein. Effective signal peptide coding regions for bacterial host cells include, but are not limited to the signal peptide coding regions obtained from the genes for Bacillus NClB 11837 maltogenic amylase, Bacillus stearothermophilus alpha-amylase, Bacillus licheniformis subtilisin, Bacillus licheniformis beta-lactamase, Bacillus stearothermophilus neutral proteases (nprT, nprS, nprM), and Bacillus subtilis prsA.

[0218] Further signal peptides are known in the art (See e.g., Simonen and Palva, Microbiol. Rev., 57:109-137 [1993]). Effective signal peptide coding regions for filamentous fungal host cells include, but are not limited to the signal peptide coding regions obtained from the genes for Aspergillus oryzae TAKA amylase, Aspergillus niger neutral amylase, Aspergillus niger glucoamylase, Rhizomucor miehei aspartic proteinase, Humicola insolens cellulase, and Humicola lanuginosa lipase. Useful signal peptides for yeast host cells include, but are not limited to those from the genes for Saccharomyces cerevisiae alpha-factor and Saccharomyces cerevisiae invertase.

[0219] In some embodiments, the control sequence is a propeptide coding region that codes for an amino acid sequence positioned at the amino terminus of a polypeptide. The resultant polypeptide is referred to as a “proenzyme,” “propolypeptide,” or “zymogen,” in some cases). A propolypeptide can be converted to a mature active polypeptide by catalytic or autocatalytic cleavage of the propeptide from the propolypeptide. The propeptide coding region includes, but is not limited to the genes for Bacillus subtilis alkaline protease (aprE), Bacillus subtilis neutral protease (nprT), Saccharomyces cerevisiae alpha-factor, Rhizomucor miehei aspartic proteinase, and Myceliophthora thermophila lactase (See e.g., WO 95/33836). Where both signal peptide and propeptide regions are present at the amino terminus of a polypeptide, the propeptide region is positioned next to the amino terminus of a polypeptide and the signal peptide region is positioned next to the amino terminus of the propeptide region.

[0220] In some embodiments, regulatory sequences are also utilized. These sequences facilitate the regulation of the expression of the polypeptide relative to the growth of the host cell. Examples of regulatory systems are those which cause the expression of the gene to be turned on or off in response to a chemical or physical stimulus, including the presence of a regulatory compound. In prokaryotic host cells, suitable regulatory sequences include, but are not limited to the lac, tac, and trp operator systems. In yeast host cells, suitable regulatory systems include, but are not limited to the ADH2 system or GAL1 system. In filamentous fungi, suitable regulatory sequences include, but are not limited to the TAKA alpha-amylase promoter, Aspergillus niger glucoamylase promoter, and Aspergillus oryzae glucoamylase promoter.

[0221] The present invention also provides recombinant expression vectors comprising a polynucleotide encoding an engineered monoamine oxidase polypeptide, and one or more expression regulating regions such as a promoter and a terminator, a replication origin, etc., depending on the type of hosts into which they are to be introduced. In some embodiments, the various nucleic acid and control sequences described above are combined together to produce a recombinant expression vector which includes one or more convenient restriction sites to allow for insertion or substitution of the nucleic acid sequence encoding the variant monoamine oxidase polypeptide at such sites. Alternatively, the polynucleotide sequence(s) of the present invention are expressed by inserting the polynucleotide sequence or a nucleic acid construct comprising the polynucleotide sequence into an appropriate vector for expression. In creating the expression vector, the coding sequence is located in the vector so that the coding sequence is operably linked with the appropriate control sequences for expression.

[0222] The recombinant expression vector may be any vector (e.g., a plasmid or virus), that can be conveniently subjected to recombinant DNA procedures and can result in the expression of the variant monoamine oxidase polynucleotide sequence. The choice of the vector will typically depend on the compatibility of the vector with the host cell into which the vector is to be introduced. The vectors may be linear or closed circular plasmids.

[0223] In some embodiments, the expression vector is an autonomously replicating vector (i.e., a vector that exists as an extra-chromosomal entity, the replication of which is independent of chromosomal replication, such as a plasmid, an extra-chromosomal element, a minichromosome, or an artificial chromosome). The vector may contain any means for assuring self-replication. In some alternative embodiments, the vector may be one which, when introduced into the host cell, is integrated into the genome and replicated together with the chromosome(s) into which it has been integrated. Furthermore, a single vector or plasmid or two or more vectors or plasmids which together contain the total DNA to be introduced into the genome of the host cell, or a transposon may be used.

[0224] In some embodiments, the expression vector preferably contains one or more selectable markers, which permit easy selection of transformed cells. A “selectable marker” is a gene the product of which provides for biocide or viral resistance, resistance to heavy metals, prototrophy to auxotrophy, and the like. Examples of bacterial selectable markers include, but are not limited to the dal genes from Bacillus subtilis or Bacillus licheniformis, or markers, which confer antibiotic resistance such as ampicillin, kanamycin, chloramphenicol or tetracycline resistance. Suitable markers for yeast host cells include, but are not limited to ADE2, HIS3, LEU2, LYS2, MET3, TRP1, and URA3. Selectable markers for use in a filamentous fungal host cell include, but are not limited to, amdS (acetamidase), argB (ornithine carbamoyltransferases), bar (phosphinothricin acetyltransferase), hph (hygromycin phosphotransferase), niaD (nitrate reductase), pyrG (orotidine-5′-phosphate decarboxylase), sC (sulfate adenyltransferase), and trpC (anthranilate synthase), as well as equivalents thereof. In another aspect, the present invention provides a host cell comprising a polynucleotide encoding at least one engineered monoamine oxidase of the present invention, the polynucleotide being operatively linked to one or more control sequences for expression of the engineered monoamine oxidase enzyme(s) in the host cell. Host cells for use in expressing the polypeptides encoded by the expression vectors of the present invention are well known in the art and include but are not limited to, bacterial cells, such as E. coli, Vibrio fluvialis, Streptomyces and Salmonella typhimurium cells; fungal cells, such as yeast cells (e.g., Saccharomyces cerevisiae and Pichia pastoris [ATCC Accession No. 201178]); insect cells such as Drosophila S2 and Spodoptera Sf9 cells; animal cells such as CHO, COS, BHK, 293, and Bowes melanoma cells; and plant cells. Exemplary host cells are Escherichia coli strains (e.g., W3110 (ΔfhuA) and BL21).

[0225] Accordingly, in another aspect, the present invention provides methods for producing the engineered monoamine oxidase polypeptides, where the methods comprise culturing a host cell capable of expressing a polynucleotide encoding the engineered monoamine oxidase polypeptide under conditions suitable for expression of the polypeptide. In some embodiments, the methods further comprise the steps of isolating and/or purifying the monoamine oxidase polypeptides, as described herein.

[0226] Appropriate culture media and growth conditions for the above-described host cells are well known in the art. Polynucleotides for expression of the monoamine oxidase polypeptides may be introduced into cells by various methods known in the art. Techniques include, among others, electroporation, biolistic particle bombardment, liposome mediated transfection, calcium chloride transfection, and protoplast fusion.

[0227] The engineered monoamine oxidases with the properties disclosed herein can be obtained by subjecting the polynucleotide encoding the naturally occurring or engineered monoamine oxidase polypeptide to mutagenesis and/or directed evolution methods known in the art, and as described herein. An exemplary directed evolution technique is mutagenesis and/or DNA shuffling (See e.g., Stemmer, Proc. Natl. Acad. Sci. USA 91:10747-10751 [1994]; WO 95/22625; WO 97/0078; WO 97/35966; WO 98/27230; WO 00/42651; WO 01/75767 and U.S. Pat. No. 6,537,746). Other directed evolution procedures that can be used include, among others, staggered extension process (StEP), in vitro recombination (See e.g., Zhao et al., Nat. Biotechnol., 16:258-261 [1998]), mutagenic PCR (See e.g., Caldwell et al., PCR Methods Appl., 3:S136-S140 [1994]), and cassette mutagenesis (See e.g., Black et al., Proc. Natl. Acad. Sci. USA 93:3525-3529 [1996]).

[0228] For example, mutagenesis and directed evolution methods can be readily applied to polynucleotides to generate variant libraries that can be expressed, screened, and assayed. Mutagenesis and directed evolution methods are well known in the art (See e.g., U.S. Pat. Nos. 5,605,793, 5,811,238, 5,830,721, 5,834,252, 5,837,458, 5,928,905, 6,096,548, 6,117,679, 6,132,970, 6,165,793, 6,180,406, 6,251,674, 6,265,201, 6,277,638, 6,287,861, 6,287,862, 6,291,242, 6,297,053, 6,303,344, 6,309,883, 6,319,713, 6,319,714, 6,323,030, 6,326,204, 6,335,160, 6,335,198, 6,344,356, 6,352,859, 6,355,484, 6,358,740, 6,358,742, 6,365,377, 6,365,408, 6,368,861, 6,372,497, 6,337,186, 6,376,246, 6,379,964, 6,387,702, 6,391,552, 6,391,640, 6,395,547, 6,406,855, 6,406,910, 6,413,745, 6,413,774, 6,420,175, 6,423,542, 6,426,224, 6,436,675, 6,444,468, 6,455,253, 6,479,652, 6,482,647, 6,483,011, 6,484,105, 6,489,146, 6,500,617, 6,500,639, 6,506,602, 6,506,603, 6,518,065, 6,519,065, 6,521,453, 6,528,311, 6,537,746, 6,573,098, 6,576,467, 6,579,678, 6,586,182, 6,602,986, 6,605,430, 6,613,514, 6,653,072, 6,686,515, 6,703,240, 6,716,631, 6,825,001, 6,902,922, 6,917,882, 6,946,296, 6,961,664, 6,995,017, 7,024,312, 7,058,515, 7,105,297, 7,148,054, 7,220,566, 7,288,375, 7,384,387, 7,421,347, 7,430,477, 7,462,469, 7,534,564, 7,620,500, 7,620,502, 7,629,170, 7,702,464, 7,747,391, 7,747,393, 7,751,986, 7,776,598, 7,783,428, 7,795,030, 7,853,410, 7,868,138, 7,783,428, 7,873,477, 7,873,499, 7,904,249, 7,957,912, 7,981,614, 8,014,961, 8,029,988, 8,048,674, 8,058,001, 8,076,138, 8,108,150, 8,170,806, 8,224,580, 8,377,681, 8,383,346, 8,457,903, 8,504,498, 8,589,085, 8,762,066, 8,768,871, 9,593,326, and all related US, as well as PCT and non-US counterparts; Ling et al., Anal. Biochem., 254(2):157-78 [1997]; Dale et al., Meth. Mol. Biol., 57:369-74 [1996]; Smith, Ann. Rev. Genet., 19:423-462 [1985]; Botstein et al., Science, 229:1193-1201 [1985]; Carter, Biochem. J., 237:1-7 [1986]; Kramer et al., Cell, 38:879-887 [1984]; Wells et al., Gene, 34:315-323 [1985]; Minshull et al., Curr. Op. Chem. Biol., 3:284-290 [1999]; Christians et al., Nat. Biotechnol., 17:259-264 [1999]; Crameri et al., Nature, 391:288-291 [1998]; Crameri, et al., Nat. Biotechnol., 15:436-438 [1997]; Zhang et al., Proc. Nat. Acad. Sci. U.S.A., 94:4504-4509 [1997]; Crameri et al., Nat. Biotechnol., 14:315-319 [1996]; Stemmer, Nature, 370:389-391 [1994]; Stemmer, Proc. Nat. Acad. Sci. USA, 91:10747-10751 [1994]; WO 95/22625; WO 97/0078; WO 97/35966; WO 98/27230; WO 00/42651; WO 01/75767; and WO 2009/152336, all of which are incorporated herein by reference).

[0229] In some embodiments, the enzyme clones obtained following mutagenesis treatment are screened by subjecting the enzymes to a defined temperature (or other assay conditions, such as testing the enzyme's activity over a broad range of substrates) and measuring the amount of enzyme activity remaining after heat treatments or other assay conditions. Clones containing a polynucleotide encoding a monoamine oxidase polypeptide are then sequenced to identify the nucleotide sequence changes (if any), and used to express the enzyme in a host cell. Measuring enzyme activity from the expression libraries can be performed using any suitable method known in the art (e.g., standard biochemistry techniques, such as HPLC analysis).

[0230] In some embodiments, the clones obtained following mutagenesis treatment can be screened for engineered monoamine oxidases having one or more desired improved enzyme properties (e.g., improved regioselectivity). Measuring enzyme activity from the expression libraries can be performed using the standard biochemistry techniques, such as GC analysis, HPLC analysis and/or derivatization of products (pre or post separation), for example, using dansyl chloride or OPA (See e.g., Yaegaki et al., J Chromatogr. 356(1):163-70 [1986]).

[0231] When the sequence of the engineered polypeptide is known, the polynucleotides encoding the enzyme can be prepared by standard solid-phase methods, according to known synthetic methods. In some embodiments, fragments of up to about 100 bases can be individually synthesized, then joined (e.g., by enzymatic or chemical ligation methods, or polymerase mediated methods) to form any desired continuous sequence. For example, polynucleotides and oligonucleotides encoding portions of the monoamine oxidase can be prepared by chemical synthesis as known in the art (e.g., the classical phosphoramidite method of Beaucage et al., Tet. Lett. 22:1859-69 [1981], or the method described by Matthes et al., EMBO J. 3:801-05 [1984]) as typically practiced in automated synthetic methods.

[0232] According to the phosphoramidite method, oligonucleotides are synthesized (e.g., in an automatic DNA synthesizer), purified, annealed, ligated and cloned in appropriate vectors. In addition, essentially any nucleic acid can be obtained from any of a variety of commercial sources. In some embodiments, additional variations can be created by synthesizing oligonucleotides containing deletions, insertions, and/or substitutions, and combining the oligonucleotides in various permutations to create engineered monoamine oxidases with improved properties.

[0233] Accordingly, in some embodiments, a method for preparing the engineered monoamine oxidase polypeptide comprises: (a) synthesizing a polynucleotide encoding a polypeptide comprising an amino acid sequence having at least about 80%, 85%, 86%, 87%, 88%, 89%, 90%, 91%, 92%, 93%, 94%, 95%, 96%, 97%, 98%, or 99% or more sequence identity to an amino acid sequence selected from the even-numbered sequences of SEQ ID NOs: 6-1084, and having one or more residue differences as compared to SEQ ID NO: 6 or 414; and (b) expressing the monoamine oxidase polypeptide encoded by the polynucleotide.

[0234] In some embodiments of the method, the polynucleotide encodes an engineered monoamine oxidase that has optionally one or several (e.g., up to 3, 4, 5, or up to 10) amino acid residue deletions, insertions and/or substitutions. In some embodiments, the amino acid sequence has optionally 1-2, 1-3, 1-4, 1-5, 1-6, 1-7, 1-8, 1-9, 1-10, 1-15, 1-20, 1-21, 1-22, 1-23, 1-24, 1-25, 1-30, 1-35, 1-40, 1-45, or 1-50 amino acid residue deletions, insertions and/or substitutions. In some embodiments, the amino acid sequence has optionally 1, 2, 3, 4, 5, 6, 7, 8, 9, 10, 11, 12, 13, 14, 15, 16, 17, 18, 19, 20, 21, 22, 23, 24, 25, 30, 30, 35, 40, 45, or 50 amino acid residue deletions, insertions and/or substitutions. In some embodiments, the amino acid sequence has optionally 1, 2, 3, 4, 5, 6, 7, 8, 9, 10, 11, 12, 13, 14, 15, 16, 18, 20, 21, 22, 23, 24, or 25 amino acid residue deletions, insertions and/or substitutions. In some embodiments, the substitutions can be conservative or non-conservative substitutions.

[0235] In some embodiments, any of the engineered monoamine oxidase enzymes expressed in a host cell can be recovered from the cells and/or the culture medium using any one or more of the well-known techniques for protein purification, including, among others, lysozyme treatment, sonication, filtration, salting-out, ultra-centrifugation, and chromatography. Suitable solutions for lysing and the high efficiency extraction of proteins from bacteria, such as E. coli, are commercially available (e.g., CelLytic B™, Sigma-Aldrich, St. Louis MO).

[0236] Chromatographic techniques for isolation of the monoamine oxidase polypeptide include, among others, reverse phase chromatography high performance liquid chromatography, ion exchange chromatography, gel electrophoresis, and affinity chromatography. Conditions for purifying a particular enzyme will depend, in part, on factors such as net charge, hydrophobicity, hydrophilicity, molecular weight, molecular shape, etc., and will be apparent to those having skill in the art.

[0237] In some embodiments, affinity techniques may be used to isolate the improved monoamine oxidase enzymes. For affinity chromatography purification, any antibody which specifically binds the monoamine oxidase polypeptide may be used. For the production of antibodies, various host animals, including but not limited to rabbits, mice, rats, etc., may be immunized by injection with a monoamine oxidase polypeptide, or a fragment thereof. The monoamine oxidase polypeptide or fragment may be attached to a suitable carrier, such as BSA, by means of a side chain functional group or linkers attached to a side chain functional group. In some embodiments, the affinity purification can use a specific ligand bound by the monoamine oxidase or dye affinity column (See e.g., EP0641862; Stellwagen, “Dye Affinity Chromatography,” In Current Protocols in Protein Science, Unit 9.2-9.2.16 [2001]).

### Methods of Using the Monoamine Oxidase Enzymes

[0238] In some embodiments, the monoamine oxidase enzymes described herein find use in processes for conversion of one or more suitable substrates to a product. In some embodiments, the monoamine oxidase enzymes described herein find use in processes for conversion of one or more suitable amine substrates to a one or more imine products. In some embodiments, the imine product is a fused bicyclic proline analogue.

[0239] In another aspect, the engineered monoamine oxidase polypeptides disclosed herein can be used in a process for the conversion of the substrate of Formula 1 to the product of Formula II, as depicted above in Scheme 1.

[chemical structure]

[0240] Scheme 5 depicts the three elementary reactions that, together, provide the overall net reaction depicted in Scheme 1. In the first reaction of Scheme 5, the secondary amine, a heterobicyclic compound according to structural Formula I is enantioselectively oxidized to the corresponding imine compound of structural Formula II by an engineered monoamine oxidase of the disclosure (which is complexed with a flavin adenine nucleotide co-factor (FAD)) to provide the corresponding substantially enantiomerically pure imine of structural Formula II and the reduced monoamine oxidase FAD complex (MAO-FAD-H₂).

[0241] In the second step, the reduced monoamine oxidase (MAO-FAD-H₂ complex) is re-oxidized by molecular oxygen, yielding hydrogen peroxide (H₂O₂) as a byproduct. In the third reaction (which is not catalyzed by the engineered monoamine oxidase), hydrogen peroxide (H₂O₂) breaks down to water and oxygen.

[0242] In certain embodiments, the present disclosure provides engineered monoamine oxidases capable of converting amine compounds of Formula I to imine compounds of Formula II. In one embodiment, the engineered monoamine oxidase polypeptides are capable of catalyzing the conversion of 6,6-dimethyl-3-azabicyclo[3.1.0]hexane (Compound 1) to (1R,5S)-6,6-dimethyl-3-azabicyclo[3.1.0]hex-2-ene (Compound 2), as depicted below in Scheme 6.

[chemical structure]

[0243] In some embodiments, the present disclosure provides engineered monoamine oxidase enzymes having improved activity in the production of Compound 2 as compared to a reference enzyme. In some embodiments, the engineered monoamine oxidase enzymes have the activity of Scheme 6.

[0244] In some embodiments, the monoamine oxidase enzymes described herein find use in processes for conversion of one or more suitable substrates to a product.

[0245] In another aspect, the present disclosure provides a process for the conversion of the substrate of Formula I to the product of Formula II using one or more engineered monoamine oxidases. In one embodiment, the present disclosure provides a process for the conversion of the substrate of Compound 1 to the product of Compound 2 using one or more engineered monoamine oxidases.

[0246] In some embodiments, the present disclosure provides a process of preparing a product of Formula II;

[chemical structure]

[0247] the process comprising a step of contacting a substrate of Formula I

[chemical structure]

with an engineered monoamine oxidase polypeptide, as disclosed herein under suitable reaction conditions, such that a product of Formula II is prepared.

[0248] In some embodiments, the present disclosure provides a process of preparing Compound 2;

[chemical structure]

[0249] the process comprising a step of contacting a substrate of Compound 1

[chemical structure]

with an engineered monoamine oxidase polypeptide, as disclosed herein under suitable reaction conditions, such that a product of Compound 2 is prepared.

[0250] In some embodiments, the process of preparing Compound 2 from Compound 1 comprises a step of contacting Compound 1 with an engineered monoamine oxidase comprising 80%, 85%, 86%, 87%, 88%, 89%, 90%, 91%, 92%, 93%, 94%, 95%, 96%, 97%, 98%, or 99% or more sequence identity to a polypeptide sequence selected from the even-numbered sequences of SEQ ID NOs: 6-1084. In some embodiments, the process of preparing Compound 2 from Compound 1 comprises a step of contacting Compound 1 with an engineered monoamine oxidase comprising a polypeptide sequence selected from the even-numbered sequences of SEQ ID NOs: 6-1084.

[0251] In certain embodiments, the present disclosure provides engineered monoamine oxidases capable of converting amine compounds of Formula I to imine compounds of Formula II, which may be further converted to the aminosulfonate products of Formula III, as depicted above in Scheme 2. In another embodiment, the aminosulfonate product of Formula III is further converted to an amino acid in the presence of an acid and water.

[0252] In one embodiment, Compound 2 is converted to Compound 3 to sequester the oxidation product, as depicted below in Scheme 7. Compound 3 is then quenched with NaOH to isolate and purify the product of Compound 2.

[chemical structure]

[0253] In the embodiments provided herein and illustrated in the Examples, various ranges of suitable reaction conditions that can be used in the processes, include but are not limited to, substrate loading, co-factor loading, pH, temperature, buffer, solvent system, polypeptide loading, oxygen sparging, antifoam, and reaction time. Further suitable reaction conditions for carrying out the process for biocatalytic conversion of substrate compounds to product compounds using an engineered monoamine described herein can be readily optimized in view of the guidance provided herein by routine experimentation that includes, but is not limited to, contacting the engineered monoamine polypeptide and one or more substrate compounds under experimental reaction conditions of concentration, pH, temperature, and solvent conditions, and detecting the product compound.

[0254] Substrate secondary amines of structural Formula I are commercially available or are readily synthesized using methods and reagents either known in the art or readily adapted, in light of the present disclosure, from methods and reagents known in the art (see e.g. Delalu et al. (1999) J. Heterocyclic Chem. 36, 681; WO 2007/022459; and WO 2007/075790, and references cited therein).

[0255] Hydrogen peroxide is a strong oxidizing agent capable of irreversibly inactivating the monoamine oxidase enzyme. Accordingly, in certain embodiments, a component useful for facilitating the disproportionation reaction depicted in step 3 of Scheme 5, above, in which hydrogen peroxide (H₂O₂) is broken down to molecular oxygen and water. In certain embodiments, that component is selected from among chemical agents, such as but not limited to Pd, Fe, and the like, while in other embodiments, that component is an enzyme, such as the enzyme catalase. In a particular embodiment, the reaction mixture further comprises the enzyme catalase to catalyze the disproportionation reaction of step 3 of Scheme 5, in which two molecules of hydrogen peroxide are broken down to provide two molecules of water and one of molecular oxygen. In particular embodiments, the catalase is an Aspergillus niger catalase that is included in the reaction at a concentration of from about 0.01% to about 1% (w/v), from about 0.05% to about 0.5% (w/v), or from about 0.1% to about 0.2% (w/v). In certain other embodiments, the catalase is a bovine catalase.

[0256] In those instances in which the compound of structural Formula I is volatile liquid, to facilitate handling, it may be provided as a salt. In one aspect of this embodiment, the amine substrate is converted to an acetate salt by addition of one equivalent of acetic acid to a 10% solution of the free base dissolved, e.g., in heptane. The precipitated salt is collected, washed with solvent (e.g., the solvent from which the salt is precipitated, e.g., heptane) and dried at room temperature (about 21° C.) under reduced pressure.

[0257] As indicated in Scheme 1, the ultimate oxidant is molecular oxygen. In view of the limited solubility of oxygen in water and in light of the decrease in that solubility as the temperature and salinity (solute concentration) increase, molecular oxygen in solution for reaction must be replenished by gas-liquid mass transfer from a gas phase. Typically, the activity and amount of preferred monoamine oxidases provided for practical reaction rates are sufficient for the reaction to become limited by the rate of gas-liquid mass transfer. As is well known, the rate of gas-liquid mass transfer is dependent on the partial pressure of the gas in the liquid, the solubility of the gas in the liquid, and the gas-liquid interfacial area. According, the rate of a gas-liquid mass transfer rate-limited reaction can be increased by engineering environments that provide aggressive gas-liquid mixing, including by sparging, hollow shaft impeller aspiration, countercurrent gas-liquid circulation, vertically serpentine tubular flow, and the like.

[0258] Additionally, in any engineering environment, the rate of an oxygen gas-liquid mass transfer rate-limited reaction can be increased by increasing the partial pressure of oxygen, either by increasing the total gas pressure, increasing the fraction of oxygen in the gas (such as enriching or replacing air with purified oxygen, of both. In particular embodiments, the concentration of dissolved oxygen and/or the rate of oxygen consumption from the gas phase is continuously monitored and the oxygen feed rate, partial pressure, mixing efficiency, or combinations thereof are adjusted to provide a beneficial rate of reaction or overall reaction time to completion.

[0259] The substrate compound(s) in the reaction mixtures can be varied, taking into consideration, for example, the desired amount of product compound, the effect of each substrate concentration on enzyme activity, stability of enzyme under reaction conditions, and the percent conversion of each substrate to product. In some embodiments, the suitable reaction conditions comprise a substrate compound loading of at least about 0.5 to about 25 g/L, 1 to about 25 g/L, 5 to about 25 g/L, about 10 to about 25 g/L, or 20 to about 25 g/L. In some embodiments, the suitable reaction conditions comprise a substrate compound loading of at least about 0.5 g/L, at least about 1 g/L, at least about 3 g/L, at least about 5 g/L, at least about 10 g/L, at least about 15 g/L, at least about 20 g/L, or at least about 30 g/L, or even greater.

[0260] In carrying out the monoamine oxidase mediated processes described herein, the engineered polypeptide may be added to the reaction mixture in the form of a purified enzyme, partially purified enzyme, whole cells transformed with gene(s) encoding the enzyme, as cell extracts and/or lysates of such cells, and/or as an enzyme immobilized on a solid support. Whole cells transformed with gene(s) encoding the engineered monoamine oxidase enzyme or cell extracts, lysates thereof, and isolated enzymes may be employed in a variety of different forms, including solid (e.g., lyophilized, spray-dried, and the like) or semisolid (e.g., a crude paste). The cell extracts or cell lysates may be partially purified by precipitation (ammonium sulfate, polyethyleneimine, heat treatment or the like, followed by a desalting procedure prior to lyophilization (e.g., ultrafiltration, dialysis, etc.). Any of the enzyme preparations (including whole cell preparations) may be stabilized by crosslinking using known crosslinking agents, such as, for example, glutaraldehyde or immobilization to a solid phase (e.g., Eupergit C, and the like).

[0261] The gene(s) encoding the monoamine oxidase polypeptides can be transformed into host cell separately or together into the same host cell. For example, in some embodiments one set of host cells can be transformed with gene(s) encoding one engineered monoamine oxidase polypeptide and another set can be transformed with gene(s) encoding another engineered monoamine oxidase polypeptide. Both sets of transformed cells can be utilized together in the reaction mixture in the form of whole cells, or in the form of lysates or extracts derived therefrom. In other embodiments, a host cell can be transformed with gene(s) encoding multiple engineered monoamine oxidase polypeptides. In some embodiments the engineered polypeptides can be expressed in the form of secreted polypeptides, and the culture medium containing the secreted polypeptides can be used for the monoamine oxidase reaction.

[0262] In some embodiments, the improved activity of the engineered monoamine oxidase polypeptides disclosed herein provides for processes wherein higher percentage conversion can be achieved with lower concentrations of the engineered polypeptide. In some embodiments of the process, the suitable reaction conditions comprise an engineered polypeptide amount of about 0.5% (w/w), 1% (w/w), 1.5% (w/w), 2% (w/w), 3% (w/w), 4% (w/w), 5% (w/w), 10% (w/w), 20% (w/w), 30% (w/w), 40% (w/w), 50% (w/w), 75% (w/w), 100% (w/w) or more of substrate compound loading.

[0263] In some embodiments, the engineered polypeptide is present at about 0.01 g/L to about 50 g/L; about 0.05 g/L to about 50 g/L; about 0.1 g/L to about 40 g/L; about 1 g/L to about 40 g/L; about 2 g/L to about 40 g/L; about 5 g/L to about 40 g/L; about 5 g/L to about 30 g/L; about 0.1 g/L to about 10 g/L; about 0.5 g/L to about 10 g/L; about 1 g/L to about 10 g/L; about 0.1 g/L to about 5 g/L; about 0.5 g/L to about 5 g/L; or about 0.1 g/L to about 2 g/L. In some embodiments, the monoamine oxidase polypeptide is present at about 0.01 g/L, 0.05 g/L, 0.1 g/L, 0.2 g/L, 0.5 g/L, 1, 2 g/L, 5 g/L, 10 g/L, 15 g/L, 20 g/L, 25 g/L, 30 g/L, 35 g/L, 40 g/L, or 50 g/L.

[0264] During the course of the reaction, the pH of the reaction mixture may change. The pH of the reaction mixture may be maintained at a desired pH or within a desired pH range. This may be done by the addition of an acid or a base (such as NaOH), before and/or during the course of the reaction.

[0265] Alternatively, the pH may be controlled by using a buffer. Accordingly, in some embodiments, the reaction condition comprises a buffer. Suitable buffers to maintain desired pH ranges are known in the art and include, by way of example and not limitation, sodium phosphate, borate, phosphate, 2-(N-morpholino)ethanesulfonic acid (MES), 3-(N-morpholino)propanesulfonic acid (MOPS), acetate, triethanolamine, and 2-amino-2-hydroxymethyl-propane-1,3-diol (Tris), and the like. In some embodiments, the reaction conditions comprise water as a suitable solvent with no buffer present.

[0266] In the embodiments of the process, the reaction conditions comprise a suitable pH. The desired pH or desired pH range can be maintained by use of an acid or base (such as NaOH), an appropriate buffer, or a combination of buffering and acid or base addition. The pH of the reaction mixture can be controlled before and/or during the course of the reaction. In some embodiments, the suitable reaction conditions comprise a solution pH from about 4 to about 11, pH from about 5 to about 10, pH from about 5 to about 9, pH from about 6 to about 9, pH from about 6 to about 8. In some embodiments, the reaction conditions comprise a solution pH of about 4, 4.5, 5, 5.5, 6, 6.5, 7, 7.5, 8, 8.5, 9, 9.5, 10, or 11.

[0267] In the embodiments of the processes herein, a suitable temperature is used for the reaction conditions, for example, taking into consideration the increase in reaction rate at higher temperatures, and the activity of the enzyme during the reaction time period. Accordingly, in some embodiments, the suitable reaction conditions comprise a temperature of about 10° C. to about 60° C., about 10° C. to about 55° C., about 15° C. to about 60° C., about 20° C. to about 60° C., about 20° C. to about 55° C., about 25° C. to about 55° C., or about 30° C. to about 50° C. In some embodiments, the suitable reaction conditions comprise a temperature of about 10° C., 15° C., 20° C., 25° C., 30° C., 35° C., 40° C., 45° C., 50° C., 55° C., or 60° C.

[0268] In some embodiments, the temperature during the enzymatic reaction can be maintained at a specific temperature throughout the course of the reaction. In some embodiments, the temperature during the enzymatic reaction can be adjusted over a temperature profile during the course of the reaction.

[0269] In some embodiments, the processes of the invention are carried out in a solvent. Suitable solvents include water, aqueous buffer solutions, organic solvents, polymeric solvents, and/or co-solvent systems, which generally comprise aqueous solvents, organic solvents and/or polymeric solvents. The aqueous solvent (water or aqueous co-solvent system) may be pH-buffered or unbuffered. In some embodiments, the processes using the engineered monoamine oxidase polypeptides can be carried out in an aqueous co-solvent system comprising an organic solvent (e.g., ethanol, isopropanol (IPA), dimethyl sulfoxide (DMSO), dimethylformamide (DMF) ethyl acetate, butyl acetate, 1-octanol, heptane, octane, methyl tert-butyl ether (MTBE), toluene, and the like), ionic or polar solvents (e.g., 1-ethyl-4-methylimidazolium tetrafluoroborate, 1-butyl-3-methylimidazolium tetrafluoroborate, 1-butyl-3-methylimidazolium hexafluorophosphate, glycerol, polyethylene glycol, and the like). In some embodiments, the co-solvent can be a polar solvent, such as a polyol, dimethylsulfoxide (DMSO), or lower alcohol. The non-aqueous co-solvent component of an aqueous co-solvent system may be miscible with the aqueous component, providing a single liquid phase, or may be partly miscible or immiscible with the aqueous component, providing two liquid phases. Exemplary aqueous co-solvent systems can comprise water and one or more co-solvents selected from an organic solvent, polar solvent, and polyol solvent. In general, the co-solvent component of an aqueous co-solvent system is chosen such that it does not adversely inactivate the monoamine oxidase enzyme under the reaction conditions. Appropriate co-solvent systems can be readily identified by measuring the enzymatic activity of the specified engineered monoamine oxidase enzyme with a defined substrate of interest in the candidate solvent system, utilizing an enzyme activity assay, such as those described herein.

[0270] In some embodiments of the process, the suitable reaction conditions comprise an aqueous co-solvent, where the co-solvent comprises DMSO at about 1% to about 50% (v/v), about 1 to about 40% (v/v), about 2% to about 40% (v/v), about 5% to about 30% (v/v), about 10% to about 30% (v/v), or about 10% to about 20% (v/v). In some embodiments of the process, the suitable reaction conditions can comprise an aqueous co-solvent comprising ethanol at about 1% (v/v), about 5% (v/v), about 10% (v/v), about 15% (v/v), about 20% (v/v), about 25% (v/v), about 30% (v/v), about 35% (v/v), about 40% (v/v), about 45% (v/v), or about 50% (v/v).

[0271] In some embodiments, the reaction conditions comprise a surfactant for stabilizing or enhancing the reaction. Surfactants can comprise non-ionic, cationic, anionic and/or amphiphilic surfactants. Exemplary surfactants, include by way of example and not limitation, nonyl phenoxypolyethoxylethanol (NP40), TRITON™ X-100 polyethylene glycol tert-octylphenyl ether, polyoxyethylene-stearylamine, cetyltrimethylammonium bromide, sodium oleylamidosulfate, polyoxyethylene-sorbitanmonostearate, hexadecyldimethylamine, etc. Any surfactant that may stabilize or enhance the reaction may be employed. The concentration of the surfactant to be employed in the reaction may be generally from 0.1 to 50 mg/ml, particularly from 1 to 20 mg/ml.

[0272] In some embodiments, the reaction conditions include an antifoam agent, which aids in reducing or preventing formation of foam in the reaction solution, such as when the reaction solutions are mixed or sparged. Antifoam agents include non-polar oils (e.g., minerals, silicones, etc.), polar oils (e.g., fatty acids, alkyl amines, alkyl amides, alkyl sulfates, etc.), and hydrophobic (e.g., treated silica, polypropylene, etc.), some of which also function as surfactants. Exemplary antifoam agents include, Antifoam-204 or Antifoam Y-30 (Sigma, St. Louis MO), Y-30® (Dow Corning), poly-glycol copolymers, oxy/ethoxylated alcohols, and polydimethylsiloxanes. In some embodiments, the antifoam can be present at about 0.001% (v/v) to about 5% (v/v), about 0.01% (v/v) to about 5% (v/v), about 0.1% (v/v) to about 5% (v/v), or about 0.1% (v/v) to about 2% (v/v). In some embodiments, the antifoam agent can be present at about 0.001% (v/v), about 0.01% (v/v), about 0.1% (v/v), about 0.5% (v/v), about 1% (v/v), about 2% (v/v), about 3% (v/v), about 4% (v/v), or about 5% (v/v) or more as desirable to promote the reaction.

[0273] The quantities of reactants used in the monoamine oxidase reaction will generally vary depending on the quantities of product desired, and concomitantly the amount of monoamine oxidase substrate employed. Those having ordinary skill in the art will readily understand how to vary these quantities to tailor them to the desired level of productivity and scale of production.

[0274] In some embodiments, the order of addition of reactants is not critical. The reactants may be added together at the same time to a solvent (e.g., monophasic solvent, biphasic aqueous co-solvent system, and the like), or alternatively, some of the reactants may be added separately, and some together at different time points. For example, the cofactor and substrate may be added first to the solvent.

[0275] The solid reactants (e.g., enzyme, salts, etc.) may be provided to the reaction in a variety of different forms, including powder (e.g., lyophilized, spray dried, and the like), solution, emulsion, suspension, and the like. The reactants can be readily lyophilized or spray dried using methods and equipment that are known to those having ordinary skill in the art. For example, the protein solution can be frozen at −80° C. in small aliquots, then added to a pre-chilled lyophilization chamber, followed by the application of a vacuum.

[0276] For improved mixing efficiency when an aqueous co-solvent system is used, the monoamine oxidase, and co-factor may be added and mixed into the aqueous phase first. The monoamine oxidase substrate may be added and mixed in, followed by the organic phase or the substrate may be dissolved in the organic phase and mixed in. Alternatively, the monoamine oxidase substrate may be premixed in the organic phase, prior to addition to the aqueous phase.

[0277] The processes of the present invention are generally allowed to proceed until further conversion of substrate to product does not change significantly with reaction time (e.g., less than 10% of substrate being converted, or less than 5% of substrate being converted). In some embodiments, the reaction is allowed to proceed until there is complete or near complete conversion of substrate to product. Transformation of substrate to product can be monitored using known methods by detecting substrate and/or product, with or without derivatization. Suitable analytical methods include gas chromatography, HPLC, MS, and the like.

[0278] In some embodiments of the process, the suitable reaction conditions comprise a substrate loading for each of one or more substrates of at least about 5 g/L, 10 g/L, 20 g/L, 30 g/L, 40 g/L, 50 g/L, 60 g/L, 70 g/L, 80 g/L, 90 g/L, 100 g/L, or more, and wherein the method results in at least about 50%, 60%, 70%, 80%, 90%, 95% or greater conversion of substrate compound to product compound in about in about 24 h or less, in about 12 h or less, in about 6 h or less, or in about 4 h or less.

[0279] In some further embodiments of the processes for converting one or more substrate compounds to product compound using the engineered monoamine oxidase polypeptides, the suitable reaction conditions can comprise an initial substrate loading to the reaction solution which is then contacted by the polypeptide. This reaction solution is then further supplemented with additional substrate compound as a continuous or batchwise addition over time at a rate of at least about 3 g/L/h, at least about 5 g/L/h, at least about 8 g/L/h, at least about 10 g/L/h, or higher for the substrate compound. Thus, according to these suitable reaction conditions, polypeptide is added to a solution having an initial substrate loading of at least about 10 g/L, 20 g/L, or 30 g/L. This addition of polypeptide is then followed by continuous addition of further substrate to the solution at a rate of about 3 g/L/h, at least about 5 g/L/h, at least about 8 g/L/h, at least about 10 g/L/h, or higher until a much higher final substrate loading of at least about 60 g/L or more is reached. Accordingly, in some embodiments of the process, the suitable reaction conditions comprise addition of the polypeptide to a solution having an initial substrate loading of at least about 10 g/L, 20 g/L, or 30 g/L followed by addition of further substrate to the solution at a rate of 3 g/L/h, at least about 5 g/L/h, at least about 8 g/L/h, at least about 10 g/L/h, or higher until a final substrate loading of at least about 60 g/L, or more, is. This substrate supplementation reaction condition allows for higher substrate loadings to be achieved while maintaining high rates of conversion of substrate to product of at least about 5%, 25%, 50%, 75%, 90% or greater conversion of substrate.

[0280] In some embodiments of the process, the suitable reaction conditions comprise a cofactor. In some embodiments, the cofactor is selected from the group consisting of FAD, FMN, NADP, and NAD. In a particular embodiment, the co-factor is FAD. In some embodiments, the suitable reaction conditions comprise an FDA co-factor at about 0.005 mM, 0.01 mM, 0.05 mM, 0.1 mM, 0.15 mM, 0.2 mM, 0.3 mM, or 0.4 mM.

[0281] In some embodiments of the process, the suitable reaction conditions comprise a component useful for facilitating the disproportionation of the hydrogen peroxide side product of the monoamine oxidase catalyzed reaction to molecular oxygen and water. In certain embodiments, that component is Pd, Fe, or catalase. In a particular embodiment, the suitable reaction conditions comprise catalase. In some embodiments, the suitable reaction conditions comprise catalase at about 0.0005 g/L, 0.001 g/L, 0.01 g/L, 0.1 g/L, 0.5 g/L, or 1 g/L.

[0282] In certain embodiments of the processes disclosed herein, the suitable reaction conditions comprise a monoamine oxidase enzyme with a co-factor and with bisulfite under conditions which yield a mixture comprising an aminosulfonate. In some embodiments, the bisulfite is added to the reaction before or simultaneously with the monoamine oxidase. In some embodiments, the bisulfate is added after addition of the monoamine oxidase. In certain other embodiments, the amine substrate is contacted with oxygen and the monoamine oxidase enzyme associated with a co-factor before addition of the bisulfite. In certain further embodiments, the suitable reaction conditions further comprise cyanide, such that the aminosulfonate is further converted to an aminonitrile. In yet further embodiments, the aminonitrile is further converted to an amino acid in the presence of an acid and water.

[0283] Any of the processes disclosed herein using the engineered polypeptides for the preparation of compounds of Formula II, including but not limited to Compound 2, can be carried out under a range of suitable reaction conditions, including but not limited to ranges of substrates, ranges FAD cofactors, ranges of catalase, temperature, pH, solvent system, polypeptide loading, and reaction time. In one example, in some embodiments, the preparation of compounds of Formula II, including but not limited to Compound 2, can be carried out wherein the suitable reaction conditions comprise: (a) substrate loading of about 0.0001 M to 1.0 M of substrate compound; (b) FAD co-factor loading of about 0.005 mM to 0.3 mM; (c) loading of about 0.001 g/L to 100 g/L of engineered polypeptide; (d) 0.01 M-1 M sodium phosphate buffer; (e) 0.0005 to 1 g/L catalase (or equivalent, as described herein); (f) pH at 6-9; (g) non-rate limiting O₂; and (g) temperature of about 20° C. to 60° C. In some embodiments, the suitable reaction conditions comprise: (a) about 20 mM of Compound 1 substrate; (b) FAD co-factor of about 0.01 mM; (c) about 0.004 g/L engineered polypeptide; (d) 50 mM sodium phosphate buffer; (e) 0.02 g/L of bovine catalase; (f) pH at 7.5; (g) non-rate limiting O₂; and (g) temperature of about 25° C.

[0284] In some embodiments, an engineered monoamine oxidase polypeptide capable of converting Compound 1 to Compound 2 comprises an amino acid sequence that is at least about 85%, 86%, 87%, 88%, 89%, 90%, 91%, 92%, 93%, 94%, 95%, 96%, 97%, 98%, or 99% identical to a reference sequence of SEQ ID NO: 6 or 414, wherein the polypeptide comprises an amino acid sequence where the amino acid residue corresponding to residue position 429 is glycine, wherein the residues are numbered with reference to the amino acid sequence of SEQ ID NO: 6 or 414, and wherein the engineered monoamine oxidase polypeptide has 2-fold, 5-fold, or 10-fold or more the activity of the engineered monoamine oxidase polypeptide of SEQ ID NO: 6 or 414.

[0285] In some embodiments, an engineered monoamine oxidase polypeptide capable of converting Compound 1 to Compound 2 comprises an amino acid sequence that is at least about 85%, 86%, 87%, 88%, 89%, 90%, 91%, 92%, 93%, 94%, 95%, 96%, 97%, 98%, or 99% identical to a reference sequence of SEQ ID NO: 6 or 414, wherein the polypeptide comprises an amino acid sequence where the amino acid residue corresponding to residue position 347 is cysteine or asparagine, and the amino acid residue corresponding to residue position 429 is glycine, wherein the residues are numbered with reference to the amino acid sequence of SEQ ID NO: 6 or 414, and wherein the engineered monoamine oxidase polypeptide has 2-fold, 5-fold, or 10-fold or more the activity of the engineered monoamine oxidase polypeptide of SEQ ID NO: 6 or 414.

[0286] In some embodiments, an engineered monoamine oxidase polypeptide capable of converting Compound 1 to Compound 2 comprises an amino acid sequence that is at least about 85%, 86%, 87%, 88%, 89%, 90%, 91%, 92%, 93%, 94%, 95%, 96%, 97%, 98%, or 99% identical to a reference sequence of SEQ ID NO: 6 or 414, wherein the polypeptide comprises an amino acid sequence where the amino acid residue corresponding to residue position 347 is cysteine or asparagine, the amino acid residue corresponding to residue position 421 is cysteine, and the amino acid residue corresponding to residue position 429 is glycine, wherein the residues are numbered with reference to the amino acid sequence of SEQ ID NO: 6 or 414, and wherein the engineered monoamine oxidase polypeptide has 2-fold, 5-fold, or 10-fold or more the activity of the engineered monoamine oxidase polypeptide of SEQ ID NO: 6 or 414.

[0287] In some embodiments, an engineered monoamine oxidase polypeptide capable of converting Compound 1 to Compound 2 comprises an amino acid sequence that is at least about 85%, 86%, 87%, 88%, 89%, 90%, 91%, 92%, 93%, 94%, 95%, 96%, 97%, 98%, or 99% identical to a reference sequence of SEQ ID NO: 6 or 414, wherein the polypeptide comprises an amino acid sequence where the amino acid residue corresponding to residue position 145 is leucine, the amino acid residue corresponding to residue position 149 is methionine, the amino acid residue corresponding to residue position 198 is aspartic acid, the amino acid residue corresponding to residue position 260 is serine, the amino acid residue corresponding to residue position 266 is leucine, the amino acid residue corresponding to residue position 338 is glycine, the amino acid residue corresponding to residue position 347 is asparagine, and the amino acid residue corresponding to residue position 429 is glycine, wherein the residues are numbered with reference to the amino acid sequence of SEQ ID NO: 6 or 414, and wherein the engineered monoamine oxidase polypeptide has 2-fold, 5-fold, or 10-fold or more the activity of the engineered monoamine oxidase polypeptide of SEQ ID NO: 6 or 414.

[0288] In some embodiments, an engineered monoamine oxidase polypeptide capable of converting Compound 1 to Compound 2 comprises an amino acid sequence that is at least about 85%, 86%, 87%, 88%, 89%, 90%, 91%, 92%, 93%, 94%, 95%, 96%, 97%, 98%, or 99% identical to a reference sequence of SEQ ID NO: 6 or 414, wherein the polypeptide comprises an amino acid sequence where the amino acid residue corresponding to residue position 87 is leucine, the amino acid residue corresponding to residue position 113 is glycine, the amino acid residue corresponding to residue position 117 is lysine, the amino acid residue corresponding to residue position 260 is serine, the amino acid residue corresponding to residue position 338 is serine, and the amino acid residue corresponding to residue position 421 is serine, wherein the residues are numbered with reference to the amino acid sequence of SEQ ID NO: 6 or 414, and wherein the engineered monoamine oxidase polypeptide has 2-fold, 5-fold, or 10-fold or more the activity of the engineered monoamine oxidase polypeptide of SEQ ID NO: 6 or 414.

[0289] In some embodiments, additional reaction components or additional techniques carried out to supplement the reaction conditions. These can include taking measures to stabilize or prevent inactivation of the enzyme, reduce product inhibition, shift reaction equilibrium to formation of the desired product.

[0290] In further embodiments, any of the above described process for the conversion of one or more substrate compounds to product compound can further comprise one or more steps selected from: extraction; isolation; purification; and crystallization of product compound. Methods, techniques, and protocols for extracting, isolating, purifying, and/or crystallizing the product from biocatalytic reaction mixtures produced by the above disclosed processes are known to the ordinary artisan and/or accessed through routine experimentation. Additionally, illustrative methods are provided in the Examples below.

[0291] Various features and embodiments of the invention are illustrated in the following representative examples, which are intended to be illustrative, and not limiting.

### EXPERIMENTAL

[0292] The following Examples, including experiments and results achieved, are provided for illustrative purposes only and are not to be construed as limiting the present invention.

[0293] In the Examples below, the following abbreviations apply: ppm (parts per million); M (molar); mM (millimolar), uM and μM (micromolar); nM (nanomolar); mol (moles); gm and g (gram); mg (milligrams); ug and μg (micrograms); L and l (liter); ml and mL (milliliter); cm (centimeters); mm (millimeters); um and μm (micrometers); sec. (seconds); min(s) (minute(s)); h(s) and hr(s) (hour(s)); U (units); MW (molecular weight); rpm (rotations per minute); psi and PSI (pounds per square inch); ° C. (degrees Centigrade); RT and rt (room temperature); CAM and cam (chloramphenicol); DMSO (dimethylsulfoxide); PMBS (polymyxin B sulfate); IPTG (isopropyl β-D-1-thiogalactopyranoside); LB (Luria-Bertani broth); TB (Terrific Broth; 12 g/L bacto-tryptone, 24 g/L yeast extract, 4 mL/L glycerol, 65 mM potassium phosphate, pH 7.0, 1 mM MgSO₄); PLP (pyridoxal 5′-phosphate), TEoA (triethanolamine buffer), HEPES (HEPES zwitterionic buffer; 4-(2-hydroxyethyl)-piperazineethanesulfonic acid); SFP (shake flask powder); CDS (coding sequence); DNA (deoxyribonucleic acid); RNA (ribonucleic acid); E. coli W3110 (commonly used laboratory E. coli strain, available from the Coli Genetic Stock Center [CGSC], New Haven, CT); HTP (high throughput); HPLC (high pressure liquid chromatography); FIOPC (fold improvements over positive control); Microfluidics (Microfluidics, Corp., Westwood, MA); Sigma-Aldrich (Sigma-Aldrich, St. Louis, MO; Difco (Difco Laboratories, BD Diagnostic Systems, Detroit, MI); Agilent (Agilent Technologies, Inc., Santa Clara, CA); Corning (Corning, Inc., Palo Alto, CA); Dow Corning (Dow Corning, Corp., Midland, MI); and Gene Oracle (Gene Oracle, Inc., Mountain View, CA).

### Example 1

### Preparation of HTP MAO-Containing Wet Cell Pellets

[0294] E. coli cells containing recombinant MAO-encoding genes from monoclonal colonies were inoculated into 180 μl LB containing 1% glucose and 30 μg/mL chloramphenicol in the wells of 96-well shallow-well microtiter plates. The plates were sealed with O₂-permeable seals, and cultures were grown overnight at 30° C., 200 rpm, and 85% humidity. Then, 10 μl of each of the cell cultures were transferred into the wells of 96-well deep-well plates containing 390 mL TB and 30 μg/mL CAM. The deep-well plates were sealed with O₂-permeable seals and incubated at 30° C., 250 rpm, and 85% humidity until OD₆₀₀ 0.6-0.8 was reached. The cell cultures were then induced by IPTG to a final concentration of 1 mM and incubated overnight at 30° C. The cells were then pelleted using centrifugation at 4,000 rpm for 10 min. The supernatants were discarded, and the pellets frozen at −80° C. prior to lysis.

### Example 2

### Preparation of HTP MAO-Containing Wet Cell Lysates

[0295] Frozen pellets prepared as described in Example 2 were lysed with 400 μl lysis buffer containing 100 mM sodium phosphate buffer, pH 7.0. 1 g/L lysozyme and 0.5 g/L polymyxin b sulfate (PMBS) was added to the cell paste in each well. The cells were lysed at room temperature for 2 hours with shaking on a bench top shaker. The plate was then centrifuged for 10 min at 4,000 rpm at 4° C. The clear supernatants were then used in biocatalytic reactions to determine their activity levels.

### Example 3

### Preparation of Lyophilized Monoamine Oxidase Lysates from Shake Flask (SF) Cultures

[0296] A single colony containing the desired gene was picked from an LB agar plate with 1% glucose and 30 μg/ml CAM, and grown overnight at 37° C. A single colony from each culture was transferred to 6 ml of LB with 1% glucose and 30 μg/ml CAM. The cultures were grown for 18 h at 30° C. and 250 rpm and subcultured approximately 1:50 into 250 ml of TB containing 30 μg/ml CAM, to a final OD₆₀₀ of 0.05. The cultures were grown for approximately 195 minutes at 30° C. and 250 rpm to an OD₆₀₀ between 0.6-0.8 and induced with 1 mM IPTG. The cultures were then grown for 20 h at 30° C. and 250 rpm. The cultures were centrifuged 4,000 rpm for 20 min. The supernatant was discarded, and the pellets were resuspended in 30 ml of 50 mM sodium phosphate, pH 7.0, and lysed using a Microfluidizer® processor system (Microfluidics) at 18,000 psi. The lysates were pelleted (10,000 rpm for 60 min), and the supernatants were frozen and lyophilized to generate shake flake (SF) enzyme powders.

### Example 4

### Improvements in Activity in MAO Relative to SEQ ID NO: 6 in High Throughput Screening

[0297] SEQ ID NO: 6 was selected as the parent enzyme that was already evolved towards improved amine monooxygenase activity and stability and disclosed in WO2010/008828A2. SEQ ID NO: 6 contains the following mutations compared to the wild-type enzyme of SEQ ID NO: 2: A289V/T315S/I316V/Q317H/A321P/T324P/E325Q/I327M/S328A/M330A/Q331N/A332I/M337Q/T339 V/D346S/N347C/K348P/T354S/A357S/C364A/L379I/F382L/T384G/D385A/A386H/D392E/R396E/E39 7A/L399K/K400M/G403E/Q404N/L405M/A406S/T409N/F410M/G411D/V412I/V421C/S433A/R434P/G436Q/M437L/V438L/E440K/C441S/Q443D/G444E/E447C/K448R/R450G/G451N/V453L/S465G/R47 9V/V480T/L482I/G486R/T487P/K488A/R489P/E490A/K492R/A493S/R494H. Libraries of engineered genes were produced using well established techniques (e.g., saturation mutagenesis, recombination of previously identified beneficial mutations). The polypeptides encoded by each gene were produced in HTP, and cell pellets were obtained, and the soluble lysate was generated as described in Example 2.

[0298] HTP reactions were performed in a 96-well format in 2 mL deep-well plates, with 100 μL total volume. HTP reactions contain 3 g/L (18 mM) 6,6-dimethyl-3-azabicyclo[3.1.0]hexane acetate, 4U catalase, 50 mM sodium phosphate pH 7.4, and 4,000× diluted MAO-N lysate. The reactions were set up as follows: (i) all the reaction components, except for catalase and MAO-N, were mixed in a single solution and pH adjusted to 7.4 using H₃PO₄. Catalase was added, and the resultant solution (90 μL) was then aliquoted into each well of the 96-well plates and (ii) diluted MAO-N lysate (10 μL of 400x) was then added into the wells to initiate the reaction. The reaction plate was heat-sealed with a foil seal and incubated at 30° C. with 600 rpm shaking for 16-18 hours. The reactions were quenched with 100 μL of a 1:1 mixture of acetonitrile in 20 mM ammonium acetate. The quenched reactions were shaken for 3 min on a tabletop shaker followed by centrifugation at 4,000 rpm for 10 mins at 4° C. to pellet any precipitate. Supernatant (90 μL) was then transferred into a 96-well round bottom plate. The samples were analyzed according to the RP-HPLC analytical method in Table 4.1.

TABLE 4.1
RP-HPLC Analytical Method

| | |
|---|---|
| Instrument | ThermoScientific U3000 UPLC with UV |
| | Detection |
| Column | Zorbax Eclipse C18 2.1 mm × 75 mm, 3.5 μm |
| Mobile Phase | Isocratic 75:25 40 mM |
| | ammonium acetate:acetonitrile |
| Flow Rate | 0.5 mL/min |
| Run Time | 2.0 min |
| Product Elution | 1.4 min |
| Column Temperature | 40° C. |
| Injection Volume | 5 μL |
| Detection | UV 254 nm |
| | Detector: Thermo VWD-3400; Peak width 0.02 |
| | min; Collection rate = 200 Hz; Time Constant = |
| | 0.12 s |

[0299] Activity relative to SEQ ID NO: 6 was calculated as fold improvement over positive control (FIOPC). It was determined by dividing the integrated area under the curve of the imine signal in each sample by area under the curve of the imine signal for parent variant (positive control) present in the same plate under the specified reaction conditions and was shown in Table 4.2.

TABLE 4.2
HTP MAO Activity for
the Production of Compound (2) Relative to SEQ ID NO: 6

| | | Product Area |
|---|---|---|
| SEQ | | Fold Improvement |
| ID NO: | Amino Acid Differences | (Relative to |
| (nt/aa) | (Relative to SEQ ID NO: 6) | SEQ ID NO: 6)¹ |
| 7/8 | W79D | +++ |
| 9/10 | S80V | +++ |
| 11/12 | P87G | +++ |
| 13/14 | W79Q | +++ |
| 15/16 | P87L | +++ |
| 17/18 | W79S | +++ |
| 19/20 | A429G | +++ |
| 21/22 | P87S | +++ |
| 23/24 | L219P/I332L | +++ |
| 25/26 | N82F | +++ |
| 27/28 | P87Y | +++ |
| 29/30 | S80I | +++ |
| 31/32 | W79A | +++ |
| 33/34 | P87W | +++ |
| 35/36 | R260S | +++ |
| 37/38 | S80H | +++ |
| 39/40 | S80N | +++ |
| 41/42 | F250V | +++ |
| 43/44 | P87H | +++ |
| 45/46 | D184F | +++ |
| 47/48 | D146A | +++ |
| 49/50 | D184R | +++ |
| 51/52 | Y238K | +++ |
| 53/54 | N82R | +++ |
| 55/56 | I332G | +++ |
| 57/58 | N82W | +++ |
| 59/60 | Y238R | +++ |
| 61/62 | D146F | +++ |
| 63/64 | L149M | +++ |
| 65/66 | C347N | +++ |
| 67/68 | T93G | +++ |
| 69/70 | C338G | +++ |
| 71/72 | H418G | +++ |
| 73/74 | S187P/M242I | +++ |
| 75/76 | L310S | +++ |
| 77/78 | W262F/A266L/C421S | +++ |
| 79/80 | C338S | +++ |
| 81/82 | S80T | +++ |
| 83/84 | C338A | +++ |
| 85/86 | P117K | +++ |
| 87/88 | D252G | ++ |
| 89/90 | E145S | ++ |
| 91/92 | N113G | ++ |
| 93/94 | E145G | ++ |
| 95/96 | P117R | ++ |
| 97/98 | L219S | ++ |
| 99/100 | I332L | ++ |
| 101/102 | T218G | ++ |
| 103/104 | W262F/C421S/C447A | ++ |
| 105/106 | M242I | ++ |
| 107/108 | L445R | ++ |
| 109/110 | H386E | ++ |
| 111/112 | R181P | ++ |
| 113/114 | C421S | ++ |
| 115/116 | F425L | ++ |
| 117/118 | L199T | ++ |
| 119/120 | L115M | ++ |
| 121/122 | F170K | ++ |
| 123/124 | I332S | ++ |
| 125/126 | E145L | ++ |
| 127/128 | M174G | ++ |
| 129/130 | L153T | ++ |
| 131/132 | N221C | ++ |
| 133/134 | V177R | ++ |
| 135/136 | E198D | ++ |
| 137/138 | P87Q/E185F | ++ |
| 139/140 | S234V | ++ |
| 141/142 | H386G | ++ |
| 143/144 | K413R | ++ |
| 145/146 | E32G/N284D | ++ |
| 147/148 | E393G | ++ |
| 149/150 | C381A | ++ |
| 151/152 | D252L | ++ |
| 153/154 | V167C | ++ |
| 155/156 | D252E | ++ |
| 157/158 | C447A | ++ |
| 159/160 | G240A | ++ |
| 161/162 | E185K | ++ |
| 163/164 | H229E | ++ |
| 165/166 | E147A | ++ |
| 167/168 | A433N | ++ |
| 169/170 | G161R | ++ |
| 171/172 | T162Q | ++ |
| 173/174 | T55A/C347D/P348K | ++ |
| 175/176 | L149M/T157A | ++ |
| 177/178 | N221V | ++ |
| 179/180 | S100P/A144E/C421S/C447A | ++ |
| 181/182 | E444L | ++ |
| 183/184 | E444D | ++ |
| 185/186 | E393K | ++ |
| 187/188 | T475I | ++ |
| 189/190 | K155L | ++ |
| 191/192 | I246M | ++ |
| 193/194 | M174T | ++ |
| 195/196 | R260F | ++ |
| 197/198 | E392G | ++ |
| 199/200 | E32G/T65V/T135Q/I246M/N284D | ++ |
| 201/202 | E185G | ++ |
| 203/204 | E208S | ++ |
| 205/206 | G47A/D197N | ++ |
| 207/208 | P117I | ++ |
| 209/210 | N387Q | + |
| 211/212 | H449R | + |
| 213/214 | T107W | + |
| 215/216 | R181C | + |
| 217/218 | W79V | + |
| 219/220 | E483R | + |
| 221/222 | D193A | + |
| 223/224 | P117C | + |
| 225/226 | A433S | + |
| 227/228 | A144E/C447A | + |
| 229/230 | N387W | + |
| 231/232 | R196G | + |
| 233/234 | R196M | + |
| 235/236 | P359S | + |
| 237/238 | M174V | + |
| 239/240 | L149V | + |
| 241/242 | S441H | + |
| 243/244 | T65V/T135Q | + |
| 245/246 | K155C | + |
| 247/248 | C306V | + |
| 249/250 | R260V | + |
| 251/252 | A300R | + |
| 253/254 | V177G | + |
| 255/256 | K155R | + |
| 257/258 | T475E | + |
| 259/260 | H127D | + |
| 261/262 | N82L | + |
| 263/264 | N221R | + |
| 265/266 | K155Q | + |
| 267/268 | E392S | + |
| 269/270 | S323R | + |
| 271/272 | E185L | + |
| 273/274 | E393M | + |
| 275/276 | A266L/C447A | + |
| 277/278 | N113W | + |
| 279/280 | P117A | + |
| 281/282 | D411V/L445R | + |
| 283/284 | T13G | + |
| 285/286 | L199V | + |
| 287/288 | E298C | + |
| 289/290 | N361L | + |
| 291/292 | T166G | + |
| 293/294 | G161L | + |
| 295/296 | N387I | + |
| 297/298 | S100P | + |
| 299/300 | M400D | + |
| 301/302 | P407G | + |
| 303/304 | Q239G | + |
| 305/306 | A114G | + |
| 307/308 | T65V/N284D | + |
| 309/310 | E32G/T135Q/N284D | + |
| 311/312 | G85S | + |
| 313/314 | W79Y | + |
| 315/316 | T475L | + |
| 317/318 | A366G | + |
| 319/320 | S100P/A144E/C447A | + |
| 321/322 | V452M | + |
| 323/324 | T136R | + |
| 325/326 | P117S | + |
| 327/328 | P117L | + |
| 329/330 | R181L | + |
| 331/332 | P169G | + |
| 333/334 | V177W | + |
| 335/336 | A385G | + |
| 337/338 | L445D | + |
| 339/340 | R290Y | + |
| 341/342 | P117T | + |
| 343/344 | A232T | + |
| 345/346 | T166L | + |
| 347/348 | C347D | + |
| 349/350 | H127R | + |
| 351/352 | E444S | + |
| 353/354 | T475S | + |
| 355/356 | G161D | + |
| 357/358 | L199I | + |
| 359/360 | G85D | + |
| 361/362 | R181G | + |
| 363/364 | M174S | + |
| 365/366 | G161Y | + |
| 367/368 | A144M | + |
| 369/370 | C277T | + |
| 371/372 | N284D | + |
| 373/374 | A61C | + |
| 375/376 | R294V | + |
| 377/378 | E185R | + |
| 379/380 | D349E | + |
| 381/382 | C277T/C347D | + |
| 383/384 | T65V/I246M | + |
| 385/386 | H449S | + |
| 387/388 | R104K | + |
| 389/390 | P434E | + |
| 391/392 | I211G | + |
| 393/394 | T65V/E190D | + |
| 395/396 | T292N | + |
| 397/398 | H127G | + |
| 399/400 | H418A | + |
| 401/402 | E444R | + |
| 403/404 | R290Q | + |
| 405/406 | T135G | + |
| 407/408 | Q254A | + |
| 409/410 | T166E | + |
| 411/412 | D252A | + |

Levels of increased activity were determined relative to the reference polypeptide of SEQ ID NO: 6 and defined as follows: “+” 1.00 to 1.09, “++” >1.09, “+++” >1.30.

### Example 5

### Improvements in Activity in MAO Relative to SEQ ID NO: 6 in Shake Flask Validation

[0300] Reactions were performed in a 96-well format in 2 mL deep-well plates, with 100 μL total volume. Reactions included 3 g/L (18 mM) 6,6-dimethyl-3-azabicyclo[3.1.0]hexane acetate, 4U catalase, 50 mM sodium phosphate pH 7.4, and 0.01 g/L MAO-N SFP. The reactions were set up as follows: (i) all the reaction components, except for catalase and MAO-N, were mixed in a single solution and pH adjusted to 7.4 using H₃PO₄. Catalase was added, and the resultant solution (90 μL) was then aliquoted into each well of the 96-well plates, and (ii) diluted MAO-N SFP (10 μL of 0.1 μL) was then added into the wells to initiate the reaction. The reaction plate was heat-sealed with a foil seal and incubated at 30° C. with 600 rpm shaking for 16-18 hours. The reactions were quenched with 100 μL of a 1:1 mixture of acetonitrile in 20 mM ammonium acetate. The quenched reactions were shaken for 3 min on a tabletop shaker followed by centrifugation at 4,000 rpm for 10 mins at 4° C. to pellet any precipitate. Supernatant (90 μL) was then transferred into a 96-well round bottom plate. The samples were analyzed according to the RP-HPLC analytical method in Table 4.1.

TABLE 5.1
MAO Activity for the Production of Compound (2) Relative to
SEQ ID NO: 6

| | | Product Area Fold |
|---|---|---|
| SEQ ID | | Improvement |
| NO: | Amino Acid Differences | (Relative to |
| (nt/aa) | (Relative to SEQ ID NO: 6) | SEQ ID NO: 6)¹ |
| 413/414 | A429G | +++ |
| 11/12 | P87G | +++ |
| 77/78 | W262F/A266L/C421S | ++ |
| 63/64 | L149M | ++ |
| 69/70 | C338G | ++ |
| 7/8 | W79D | + |
| 35/36 | R260S | + |
| 59/60 | Y238R | + |
| 9/10 | S80V | + |
| 23/24 | L219P/I332L | + |
| 47/48 | D146A | + |

Levels of increased activity were determined relative to the reference polypeptide of SEQ ID NO: 6 and defined as follows: ″+″ .90 to 1.35, ″++″ > 1.35, ″+++″ > 2.08

### Example 6

### Improvements in Activity in MAO Relative to SEQ ID NO: 6 in High Throughput Screening

[0301] HTP reactions were performed in a 96-well format in 2 mL deep-well plates, with 100 μL total volume. HTP reactions contain 3 g/L (18 mMv) 6,6-dimethyl-3-azabicyclo[3.1.0]hexane acetate, 4U catalase, 50 mM sodium phosphate pH 7.4, and 4,000× diluted MAO-N lysate. The reactions were set up as follows: (i) all the reaction components, except for catalase and MAO-N, were mixed in a single solution and pH adjusted to 7.4 using H₃PO₄. Catalase was added, and the resultant solution (90 μL) was then aliquoted into each well of the 96-well plates, and (ii) diluted MAO-N lysate (10 μL of 400×) was then added into the wells to initiate the reaction. The reaction plate was heat-sealed with a foil seal and incubated at 30° C. with 600 rpm shaking for 16-18 hours. The reactions were quenched with 100 μL of a 1:1 mixture of acetonitrile in 20 mMv ammonium acetate. The quenched reactions were shaken for 3 min on a tabletop shaker followed by centrifugation at 4,000 rpm for 10 mins at 4° C. to pellet any precipitate. Supernatant (90 μL) was then transferred into a 96-well round bottom plate. The samples were analyzed according to the RP-HPLC analytical method in Table 4.1.

TABLE 6.1
HTP MAO Activity for the Production of Compound (2)
Relative to SEQ ID NO: 6

| | | Product |
|---|---|---|
| | | Area Fold |
| | | Improvement |
| SEQ ID | | (Relative to |
| NO: | Amino Acid Differences | SEQ ID |
| (nt/aa) | (Relative to SEQ ID NO: 6) | NO: 6)¹ |
| 415/416 | P87L/C421S | +++ |
| 417/418 | N82R/P87G | +++ |
| 419/420 | N82F/P87G/T218G/C338S | +++ |
| 421/422 | P87G/T218G/L219S/C338S | +++ |
| 423/424 | N82R/R260S/C338A/C421S | +++ |
| 425/426 | N82F/P87L | +++ |
| 427/428 | P87G/R260S | +++ |
| 429/430 | N82F/P87L/L219S/C421S | +++ |
| 431/432 | N82F/P87L/N113G/P117K/T218G | +++ |
| 433/434 | P87L/T218G/H418G | +++ |
| 435/436 | P87L/N113G/P117K/R260S/C338S/ | +++ |
| | C421S | |
| 437/438 | R260S/C338G | +++ |
| 439/440 | K110N/C338G/H418G | +++ |
| 441/442 | N82R/N113G/C338S | +++ |
| 443/444 | L219S/C421S | +++ |
| 445/446 | N82F/P87G/N113G/P117K/R260S/ | +++ |
| | C338G | |
| 447/448 | S80H/A429G | +++ |
| 449/450 | N82F/P87G/P117K | +++ |
| 451/452 | P87L/P117K/T218G/L219S | +++ |
| 453/454 | W79D/Y183F/N284D/I332G | +++ |
| 455/456 | N82R/P87G/N113G/C421S | +++ |
| 457/458 | N82F/P87L/C338S | +++ |
| 459/460 | P117K/L219S | +++ |
| 461/462 | N82F/P87G/C338S/H418G | +++ |
| 463/464 | P87G/N113G | +++ |
| 465/466 | N82R/P87G/P117K/R260S/C338S/ | +++ |
| | C421S | |
| 467/468 | P87L/N113G/L219S/C421S | +++ |
| 469/470 | P87L/C338A | +++ |
| 471/472 | N82R/C338A/H418G/C421S | +++ |
| 473/474 | L310S/C338S/H418G | +++ |
| 475/476 | P87G/L310S/C338S | +++ |
| 477/478 | P87G/C338A | +++ |
| 479/480 | P87L/L219S/C338G | +++ |
| 481/482 | S80V/H386E/A429G | +++ |
| 483/484 | S80H/Y183F/N284D/I332G/C381A/ | +++ |
| | H386E/A429G | |
| 485/486 | T218G/R260S/C338A | +++ |
| 487/488 | P87L/P117K | +++ |
| 489/490 | Y238R/N284D/H386E/A429G | +++ |
| 491/492 | D146A/L149M/M242I/I246M/L445R | +++ |
| 493/494 | N82R/P87L/N113G | +++ |
| 495/496 | N82R/P87G/P117K/C338A/H418G | +++ |
| 497/498 | S100P/E145S/D146A/L149M/E198D/ | +++ |
| | M242I/F250V/D252G/C347N/P348K/ | |
| | C447A | |
| 499/500 | P87G/H418G | +++ |
| 501/502 | W79D/S80V/I332G/A429G | +++ |
| 503/504 | P87L | +++ |
| 505/506 | N82F/P87L/P117K | +++ |
| 507/508 | E145G/L149M/S205T/I246M/F250V/ | +++ |
| | D252G | |
| 509/510 | N82R/N113G/L219S/C338S | +++ |
| 511/512 | H386E/A429G | +++ |
| 513/514 | N82R/P87L/T218G/L219S/C338S | +++ |
| 515/516 | M242L/N284D/C381A/A429G | +++ |
| 517/518 | N82F/H418G | +++ |
| 519/520 | W79D | +++ |
| 521/522 | D184R/N284D/A429G | +++ |
| 523/524 | E145G/F250V/D252G/P348K | +++ |
| 525/526 | N82F/P87G/T218G | +++ |
| 527/528 | P87G/N113G/P117K/H418G/C421S | +++ |
| 529/530 | Y238R/A429G | +++ |
| 531/532 | S100P/D146A/F250V/C447A | ++ |
| 533/534 | P87L/L219S | ++ |
| 535/536 | E145S/D252G/P348K/C447A | ++ |
| 537/538 | T218G | ++ |
| 539/540 | P87L/L219S/H418G | ++ |
| 541/542 | N82R/P87G/P117K/T218G/C421S | ++ |
| 543/544 | P87G/N113G/R260S | ++ |
| 545/546 | S100P/D146A/L149M/E198D/M242I/ | ++ |
| | I246M/C277T/C347D/P348K/L445R/ | |
| | C447A | |
| 547/548 | I332G/H386E | ++ |
| 549/550 | P87G/L310S | ++ |
| 551/552 | N82F/P87G/N113G/P117K/L219S | ++ |
| 553/554 | Y238R/C381A/A429G | ++ |
| 555/556 | S100P/E143D/E145S/D146A/L149M/ | ++ |
| | E198D/M242I/C347N/P348K/L445R/ | |
| | C447A | |
| 557/558 | S100P/E145S/L149M/C347N/L445R/ | ++ |
| | C447A | |
| 559/560 | D146A/C277T/C347N/L445R/C447A | ++ |
| 561/562 | R260S | ++ |
| 563/564 | S100P/L149M/F250V/C347N/C447A | ++ |
| 565/566 | N82R/T218G/L219S/C421S | |
| 567/568 | E145S/I246M/D252G/C347D/C447A | ++ |
| 569/570 | S100P/D146A/C347D/P348K/L445R/ | ++ |
| | C447A | |
| 571/572 | S100P/E145G/L149M/M242I/L445R/ | ++ |
| | C447A | |
| 573/574 | L310S/H418G/C421S | ++ |
| 575/576 | Y238R/H386E | ++ |
| 577/578 | T93G/Y238R/N284D | ++ |
| 579/580 | A429G | ++ |
| 581/582 | I332G/A429G | ++ |
| 583/584 | D146A/L445R/C447A | ++ |
| 585/586 | S100P/E145G/L149M/M242I/I246M/ | ++ |
| | C347D/P348K/L445R/C447A | |
| 587/588 | D184R/N284D | ++ |
| 589/590 | Y238R/I332G/A429G | ++ |
| 591/592 | N113G/C338A/C421S | ++ |
| 593/594 | N113G/T218G/C338S/C421S | ++ |
| 595/596 | N284D/H386E/A429G | ++ |
| 597/598 | E145G/S255R | ++ |
| 599/600 | E145G/L149M/E198D/C347N/C447A | ++ |
| 601/602 | E145G/D146A/L149M/C277T/C347D | ++ |
| 603/604 | S80V/T237S/I332G | ++ |
| 605/606 | S80H/C381A | ++ |
| 607/608 | S100P/D146A/E198D/L445R | ++ |
| 609/610 | S80H/I332G/C381A/H386E | ++ |
| 611/612 | S80V/I332G | ++ |
| 613/614 | S100P/E145G/D146A/L149M/F250V/ | ++ |
| | C277T/C347N/P348K/C447A | |
| 615/616 | L219S/C338A/H418G | ++ |
| 617/618 | S100P/E145S/L149M/E198D/M242I/ | ++ |
| | C277T/C347N/P348K/C447A | |
| 619/620 | S100P/D146A/E198D/C347D/P348K/ | ++ |
| | C447A | |
| 621/622 | S100P/E145S/D146A/L149M/S205T/ | ++ |
| | C347D/L445R/C447A | |
| 623/624 | S100P/E145S/L149M/I246M/C347N/ | ++ |
| | L445R | |
| 625/626 | R260S/C338G/H418G/C421S | ++ |
| 627/628 | E145S/L149M/C347N/P348K/L445R | ++ |
| 629/630 | W79A/T93G/H386E | ++ |
| 631/632 | D146A/L149M/I246M/D252G/C447A | ++ |
| 633/634 | S100P/E145S/D146A/L149M/E198D | ++ |
| 635/636 | E145G/L149M/S205T/M242I/C347N/ | ++ |
| | P348K/L445R | |
| 637/638 | P87L/N113G/P117K/L219S/C338G/ | ++ |
| | H418G/C421S | |
| 639/640 | D146A/C277T/C347N/P348K | ++ |
| 641/642 | W79D/S80V | ++ |
| 643/644 | E145S/C347D/P348K/L445R/C447A/ | ++ |
| | V491A | |
| 645/646 | S100P/C347N/P348K/L445R | ++ |
| 647/648 | P87G | ++ |
| 649/650 | S80H/H386E | ++ |
| 651/652 | S100P/E145G/E198D/A300V | ++ |
| 653/654 | N82F/N113G/T218G/C338S/H418G | ++ |
| 655/656 | S100P/E145G/L149M/S205T | ++ |
| 657/658 | N82R/P87L/C338G/C421S | ++ |
| 659/660 | S100P/E143V/E145G/L149M/C347N/ | ++ |
| | C447A | |
| 661/662 | E145G/D146A/L149M/C347D/P348K | ++ |
| 663/664 | S100P/M242I/C347D/P348K/L445R/ | ++ |
| | C447A | |
| 665/666 | S100P/E145G/L149M/E198D/M242I/ | ++ |
| | I246M/L445R/C447A | |
| 667/668 | S100P/M242I/C347D/P348K/L445R | ++ |
| 669/670 | E145S/L149M/E198D/S205T/P348K | ++ |
| 671/672 | S100P/E145S/I246M/C347N/P348K/ | ++ |
| | L445R | |
| 673/674 | S80V/I332G/H386E | ++ |
| 675/676 | S80V/N284D | ++ |
| 677/678 | C338G/H418G | ++ |
| 679/680 | E145G/L149M/M242I/P348K | ++ |
| 681/682 | S100P/E198D/C347D/P348K/L445R | ++ |
| 683/684 | D146A/M242I | ++ |
| 685/686 | I332G | ++ |
| 687/688 | H418G | ++ |
| 689/690 | S100P/D146A/M242I/C277T/C447A | ++ |
| 691/692 | E198D/F250V | ++ |
| 693/694 | N113G/C338G | ++ |
| 695/696 | E145S/D146A/E198D/L445R/C447A | ++ |
| 697/698 | T93G/Y238R/H386E/A429G | ++ |
| 699/700 | E145G/L149M/I246M | ++ |
| 701/702 | S100P/E198D/C447A | ++ |
| 703/704 | N82R/N113G/T218G/C338A | ++ |
| 705/706 | D146A/C277T | + |
| 707/708 | S100P/E145S/L149M/I246M/D252G/ | + |
| | C277T/C347N/L445R/C447A | |
| 709/710 | S100P/E145S/C277T/C347N | + |
| 711/712 | S100P/E145S/D146A/L149M | + |
| 713/714 | E145S/L149M/C347N/C447A | + |
| 715/716 | L149M/C347N/P348K/L445R/C447A | + |
| 717/718 | E145S/L149M/E198D/I246M/C447A | + |
| 719/720 | D146A/1246M/C277T/P348K/L445R/ | + |
| | C447A | |
| 721/722 | S100P/E145S/D146A/L149M/M242I/ | + |
| | L445R | |
| 723/724 | E145S/D146A/L149M/S205T/P348K/ | + |
| | C447A | |
| 725/726 | S80H/Y238R/H386E/A429G | + |
| 727/728 | D146A/E198D/C277T/P348K/C447A | + |
| 729/730 | E145S/L149M/M242I | + |
| 731/732 | S100P/E198D/C347N/L445R | + |
| 733/734 | S100P/E198D/C277T/C347N/P348K | + |
| 735/736 | S100P/E145G/L149M/H154L/I246M/ | + |
| | C277T | |
| 737/738 | D184R | + |
| 739/740 | S100P/L149M/I246M/C447A | + |
| 741/742 | E145S/L149M/E198D/M242I/C277T/ | + |
| | C347D | |
| 743/744 | N82R/P87L | + |
| 745/746 | P117K/R260S | + |
| 747/748 | L149M/E198D/P348K | + |
| 749/750 | S100P/C277T/C347D/L445R/C447A | + |
| 751/752 | E145S/C277T/P348K/C447A | + |
| 753/754 | T93G/D184R/A429G | + |
| 755/756 | N82F/P87L/N113G/P117K/L219S/ | + |
| | H418G | |
| 757/758 | D146A/C277T/L445R/C447A | + |
| 759/760 | S100P/E198D/C347D/P348K | + |
| 761/762 | N284D/I332G | + |
| 763/764 | S100P/E145S/L149M/E198D/M242I/ | + |
| | I246M/C277T/P348K/C447A | |
| 765/766 | P87L/N113G | + |
| 767/768 | S100P/M242I/P348K/L445R | + |
| 769/770 | D146A/L149M/C277T/P348K/C447A | + |
| 771/772 | D146A/P348K | + |
| 773/774 | T93G/Y238R | + |
| 775/776 | E145S/I246M | + |
| 777/778 | D146A/E198D/I246M/C277T | + |
| 779/780 | S100P/E145S/L149M/M242I/I246M/ | + |
| | C277T/C347N/L445R | |
| 781/782 | S100P/E145S/S205T/C277T/P348K | + |
| 783/784 | S205T/C347D/P348K/L445R/C447A | + |
| 785/786 | E145S/L149M/I246M/C347D/L445R | + |
| 787/788 | E145S/L445R/C447A | + |
| 789/790 | S100P/L149M/I246M/C277T/P348K/ | + |
| | L445R | |
| 791/792 | P87G/L219S | + |
| 793/794 | E198D/I246M | + |
| 795/796 | P87L/T218G | + |
| 797/798 | L149M/E198D/C277T/C347N/P348K | + |
| 799/800 | E145S/L149M/S205T/C277T/L445R | + |
| 801/802 | C347N/P348K/L445R | + |
| 803/804 | E145S/L149M/E198D/M242I/I246M/ | + |
| | P348K | |
| 805/806 | S100P/E145G/P348K | + |
| 807/808 | W79A/S80H | + |
| 809/810 | S80V/Y238R/I332G | + |
| 811/812 | E145S/L149M/I246M/C447A | + |
| 813/814 | S205T/I246M/C347N | + |
| 815/816 | D146A/C347D/P348K/C447A | + |
| 817/818 | S100P/L149M/M242I/C347N/P348K/ | + |
| | C447A | |
| 819/820 | S100P/C347N/C447A | + |
| 821/822 | N82F/P87G/T218G/L219S/C421S | + |
| 823/824 | N82R/P87L/L219S | + |
| 825/826 | E145G/E198D/S205T/P348K | + |
| 827/828 | S80H | + |
| 829/830 | S100P/L149M/M242I/I246M/C277T/ | + |
| | C347N/P348K/L445R | |
| 831/832 | S80H/Y188F/E190D/I332G/H386E | + |
| 833/834 | P87L/T218G/L219S | + |
| 835/836 | L219S | + |
| 837/838 | E145G/D146A/C277T/C347N | + |
| 839/840 | S100P/E145S/L149M/C277T/P348K/ | + |
| | L445R | |
| 841/842 | E145S/D146A/L149M/E198D/C277T/ | + |
| | L445R/C447A | |
| 843/844 | E145S/D146A/L149M/F250V/C277T/ | + |
| | C347D/P348K/C447A | |
| 845/846 | H386E | + |
| 847/848 | S100P/C277T/P348K | + |
| 849/850 | D146A/L149M/S151C/I246M/P348K | + |
| 851/852 | S100P/E198D/S205T/P348K | + |
| 853/854 | W79D/T93G | + |
| 855/856 | Y238R | + |
| 857/858 | L149M | + |
| 859/860 | S80V | + |
| 861/862 | E145S/L149M/C447A | + |
| 863/864 | S100P | + |
| 865/866 | S100P/L149M/E198D | + |
| 867/868 | S100P/M242I/C277T/P348K | + |
| 869/870 | M242I | + |
| 871/872 | S80V/H386E | + |
| 873/874 | S100P/I246M/C277T/P348K/L445R | + |
| 875/876 | W79A/T93G/Y238R/H386E/A429G | + |
| 877/878 | W79A/Y238R/I332G/A429G | + |
| 879/880 | I246M | + |
| 881/882 | S80V/N284D/H386E | + |
| 883/884 | C338G | + |
| 885/886 | T93G/Y238R/H386E | + |
| 887/888 | S205T/D252G/C347D/L445R/C447A | + |
| 889/890 | W79A/Y238R/A429G | + |
| 891/892 | E145S/D146A/E198D/S205T/M242I/ | + |
| | C277T/P348K/C447A | |
| 893/894 | N284D | + |
| 895/896 | N82F/P87L/N113G/P117K/C338G/ | + |
| | H418G | |
| 897/898 | E198D/C277T/P348K/C447A | + |
| 899/900 | N284D/H386E | + |
| 901/902 | I246M/L445R/C447A | + |
| 903/904 | D184R/H386E | + |
| 905/906 | E145S/D146A/L149M/E198D/M242I/ | + |
| | D252G/C277T/C347N | |
| 907/908 | I246M/C277T/P348K/C447A | + |
| 909/910 | S100P/L445R/C447A | + |
| 911/912 | S100P/E145G/E198D/M242I/I246M/ | + |
| | P348K | |
| 913/914 | E145S/L149M/E198D/M242I/I246M/ | + |
| | C277T/C347N/C447A | |
| 915/916 | S100P/C277T/P348K/C447A | + |
| 917/918 | P87L/N113G/T218G/L219S/R260S/ | + |
| | C338A | |
| 919/920 | E198D/L445R | + |
| 921/922 | E145S/D146A/L149M/H154L/ | + |
| | I246M/C277T/C347N/P348K | |
| 923/924 | E145S/D146A/I246M/C347N/ | + |
| | P348K/C447A | |
| 925/926 | S100P/M242I/I246M/C277T | + |
| 927/928 | F121C/E198D/C347N/L445R/C447A | + |
| 929/930 | S100P/E145G/L149M/E198D/ | + |
| | D252G/P348K/L445R | |
| 931/932 | C277T/C347N/C447A | + |
| 933/934 | S205T | + |
| 935/936 | M242I/P348K | + |
| 937/938 | C447A | + |
| 939/940 | C347N/P348K/C447A | + |
| 941/942 | S100P/M242I/I246M/C347N | + |
| 943/944 | M242I/L445R/C447A | + |
| 945/946 | P87G/P117K/L219S/L310S/C338S | + |
| 947/948 | E145G/K155I/L445R/C447A | + |
| 949/950 | D146A/M242I/I246M/C277T/C347N/ | + |
| | P348K/L445R/C447A | |
| 951/952 | L149M/M242I/I246M/P348K/L445R | + |
| 953/954 | P348K/C447A | + |
| 955/956 | E198D/M242I/P348K | + |
| 957/958 | L149M/E198D/L445R | + |
| 959/960 | S100P/E145G/M242I/I246M/C277T/ | + |
| | L445R/C447A | |
| 961/962 | L149M/L445R | + |
| 963/964 | E145G/C277T/C347N/L445R | + |
| 965/966 | S100P/L149M/M242I/I246M/C277T/ | + |
| | C347N/P348K/C447A | |
| 967/968 | E145G/D146A/C347D/C447A | + |
| 969/970 | P348K | + |
| 971/972 | S100P/E145G/S205T/I246M/C277T/ | + |
| | P348K/L445R | |
| 973/974 | N82F | + |
| 975/976 | S100P/E145S/D146A/L149M/ | + |
| | H154L/P348K/L445R | |
| 977/978 | L149M/M242I/I246M | + |
| 979/980 | C277T/C347N/P348K/L445R | + |
| 981/982 | M242I/C277T/C347D/P348K | + |
| 983/984 | W79A/Y238R | + |
| 985/986 | E145S/D146A/I246M/C277T/C447A | + |
| 987/988 | P348K/L445R/C447A | + |
| 989/990 | Y238R/M242L/N284D | + |
| 991/992 | S100P/E145G/E198D/C277T/P348K/ | + |
| | L445R | |
| 993/994 | E145G/D146A/L445R/C447A | + |

Levels of increased activity were determined relative to the reference polypeptide of SEQ ID NO: 6 and defined as follows: ″+″ .95 to 1.50, ″++″ > 1.50, ″+++″ > 2.50

### Example 7

### Improvements in Activity in MAO Relative to SEQ ID NO: 6 in Shake Flask Validation

[0302] Reactions were performed in a 96-well format in 2 mL deep-well plates, with 100 μL total volume. Reactions included 3 g/L (18 mMv) 6,6-dimethyl-3-azabicyclo[3.1.0]hexane acetate, 4U catalase, 50 mM sodium phosphate pH 7.4, and 0.004 g/L MAO-N SFP. The reactions were set up as follows: (i) all the reaction components, except for catalase and MAO-N, were mixed in a single solution and pH adjusted to 7.4 using H₃PO₄. Catalase was added, and the resultant solution (90 μL) was then aliquoted into each well of the 96-well plates, and (ii) diluted MAO-N SFP (10 μL of 0.04 g/L) was then added into the wells to initiate the reaction. The reaction plate was heat-sealed with a foil seal and incubated at 30° C. with 600 rpm shaking for 16-18 hours. The reactions were quenched with 100 μL of a 1:1 mixture of acetonitrile in 20 mM ammonium acetate. The quenched reactions were shaken for 3 min on a tabletop shaker followed by centrifugation at 4,000 rpm for 10 mins at 4° C. to pellet any precipitate. Supernatant (90 μL) was then transferred into a 96-well round bottom plate. The samples were analyzed according to the RP-HPLC analytical method in Table 4.1.

TABLE 7.1
MAO Activity for the Production of Compound (2) Relative
to SEQ ID NO: 6

| | | Product |
|---|---|---|
| | | Area Fold |
| SEQ ID | | Improvement |
| NO: | Amino Acid Differences | (Relative to |
| (nt/aa) | (Relative to SEQ ID NO: 6) | SEQ ID NO: 6)¹ |
| 435/436 | P87L/N113G/P117K/R260S/C338S/C421S | +++ |
| 415/416 | P87L/C421S | +++ |
| 995/996 | S80H/A429G | ++ |
| 439/440 | K110N/C338G/H418G | ++ |
| 507/508 | E145G/L149M/S205T/I246M/F250V/D252G | ++ |
| 515/516 | M242L/N284D/C381A/A429G | + |
| 497/498 | S100P/E145S/D146A/L149M/E198D/M242I/ | + |
| | F250V/D252G/C347N/P348K/C447A | |
| 617/618 | S100P/E145S/L149M/E198D/M242I/C277T/ | + |
| | C347N/P348K/C447A | |
| 997/998 | Y238R/H386E/A429G | + |
| 567/568 | E145S/I246M/D252G/C347D/C447A | + |
| 535/536 | E145S/D252G/P348K/C447A | + |

Levels of increased activity were determined relative to the reference polypeptide of SEQ ID NO: 6 and defined as follows: ″+″ 1.02 to 1.50, ″++″ > 1.50, ″+++″ > 1.8

### Example 8

### Improvements in Activity in MAO Relative to SEQ ID NO: 414 in High Throughput

[0303] Reactions were performed in a 96-well format in 2 mL deep-well plates, with 100 μL total volume. Reactions included 12.7 g/L (75 m) 6,6-dimethyl-3-azabicyclo[3.1.0]hexane acetate, 4U catalase, 50 mM sodium phosphate pH 7.4, and 4,000× diluted MAO-N lysate. The reactions were set up as follows: (i) all the reaction components, except for catalase and MAO-N, were mixed in a single solution and pH adjusted to 7.4 using H₃PO₄. Catalase was added, and the resultant solution (90 μL) was then aliquoted into each well of the 96-well plates, and (ii) diluted MAO-N lysate (10 μL of 400×) was then added into the wells to initiate the reaction. The reaction plate was heat-sealed with a foil seal and incubated at 30° C. with 600 rpm shaking for 16-18 hours. The reactions were quenched with 100 μL of a 1:1 mixture of acetonitrile in 20 mMv ammonium acetate. The quenched reactions were shaken for 3 min on a tabletop shaker followed by centrifugation at 4,000 rpm for 10 mins at 4° C. to pellet any precipitate. Supernatant (90 μL) was then transferred into a 96-well round bottom plate. The samples were analyzed according to the RP-HPLC analytical method in Table 4.1.

TABLE 8.1
HTP MAO Activity for the Production of Compound (2) Relative to
SEQ ID NO: 414

| | | Product Area |
|---|---|---|
| | | Fold |
| | | Improvement |
| SEQ ID | | (Relative to |
| NO: | Amino Acid Differences | SEQ ID |
| (nt/aa) | (Relative to SEQ ID NO: 414) | NO: 414)¹ |
| 999/1000 | E145L/L149M/E198D/R260S/A266L/ | +++ |
| | C338G/C347N | |
| 1001/1002 | N113G/P117K/D146A/L149M/R260S/ | +++ |
| | W262F | |
| 1003/1004 | P87G/E145L/L149M/E198D/C447A | +++ |
| 1005/1006 | L149M/E198D/I246M/R260S/A266L/C421S | +++ |
| 1007/1008 | P117K/E145L/L149M/N284D/C447A | +++ |
| 1009/1010 | D146A/L149M/R260S/W262F/C347N | +++ |
| 1011/1012 | P87L/L149M/R260S/W262F/A266L/C381A | +++ |
| 1013/1014 | P117K/E145L/D146A/W262F/N284D | +++ |
| 1015/1016 | M242I/I246M/C338G/C347N | ++ |
| 1017/1018 | N113G/E145L/D146A/L149M/M242I/ | ++ |
| | C447A | |
| 1019/1020 | P117K/E198D/W262F | ++ |
| 1021/1022 | P117K/I246M/R260S/W262F/C381A | ++ |
| 1023/1024 | P117K/M242I/I246M/R260S/A266L/ | ++ |
| | N284D/C381A | |
| 1025/1026 | E145L/D146A/M242I/R260S/W262F/ | ++ |
| | C338G/C347N/C447A | |
| 1027/1028 | E145L/D146A/L149M/R260S/W262F/ | ++ |
| | C338G/C347N | |
| 1029/1030 | P117K/E198D | ++ |
| 1031/1032 | P117K/I246M/N284D | ++ |
| 1033/1034 | N113G/M242I/C347N | ++ |
| 1035/1036 | C347N/C381A | ++ |
| 1037/1038 | P117K/M242I/R260S/W262F | ++ |
| 1039/1040 | P87G/N113G/E145L/E198D/M242I/ | ++ |
| | I246M/W262F/A266L | |
| 1041/1042 | P117K/L149M | + |
| 1043/1044 | P87L/N284D/C338G/C347N | + |
| 1045/1046 | E145L/L149M/R260S/A266L/C338G/ | + |
| | C347N/C381A/C447A | |
| 1047/1048 | I246M | + |
| 1049/1050 | C447A | + |
| 1051/1052 | E198D/C447A | + |
| 1053/1054 | P87G/L149M/M242I/R260S/A266L | + |
| 1055/1056 | M242I/C381A | + |
| 1057/1058 | M242I/R260S/W262F/C338G | + |
| 1059/1060 | N113G/P117K/A266L/C381A | + |
| 1061/1062 | P87G/P117K/L149M/M242I | + |
| 1063/1064 | N113G/P117K/C447A | + |
| 1065/1066 | P117K/A266L | + |
| 1067/1068 | W262F | + |
| 1069/1070 | P87L/M242I/I246M/R260S/W262F/ | + |
| | A266L/C338G | |
| 1071/1072 | N113G/M242I/C381A | + |
| 1073/1074 | M242I | + |
| 1075/1076 | P87L/P117K/M242I/R260S/A266L | + |
| 1077/1078 | R260S/A266L | + |
| 1079/1080 | R260S/W262F/C277T/N284D/C447A | + |
| 1081/1082 | P87L/E198D | + |
| 1083/1084 | M242I/I246M | + |

Levels of increased activity were determined relative to the reference polypeptide of SEQ ID NO: 414 and defined as follows: ″+″ .95 to 1.61, ″++″ > 1.61, ″+++″ > 2.62

### Example 9

### Improvements in Activity in MAO Relative to SEQ ID NO: 414 in Shake Flask Validation

[0304] Reactions were performed in a 96-well format in 2 mL deep-well plates, with 100 μL total volume. Reactions included 12.7 g/L (75 mMv) 6,6-dimethyl-3-azabicyclo[3.1.0]hexane acetate, 4U catalase, 50 mM sodium phosphate pH 7.4, and 0.01 g/L MAO-N SFP. The reactions were set up as follows: (i) all the reaction components, except for catalase and MAO-N, were mixed in a single solution and pH adjusted to 7.4 using H₃PO₄. Catalase was added, and the resultant solution (90 μL) was then aliquoted into each well of the 96-well plates, and (ii) diluted MAO-N SFP (10 μL of 0.1 g/L) was then added into the wells to initiate the reaction. The reaction plate was heat-sealed with a foil seal and incubated at 30° C. with 600 rpm shaking for 16-18 hours. The reactions were quenched with 100 μL of a 1:1 mixture of acetonitrile in 20 mMv ammonium acetate. The quenched reactions were shaken for 3 min on a tabletop shaker followed by centrifugation at 4,000 rpm for 10 mins at 4° C. to pellet any precipitate. Supernatant (90 μL) was then transferred into a 96-well round bottom plate. The samples were analyzed according to the RP-HPLC analytical method in Table 4.1.

TABLE 9.1
MAO Activity for the Production of Compound (2) Relative to
SEQ ID NO: 414

| | | Product Area |
|---|---|---|
| | | Fold |
| | | Improvement |
| SEQ ID | | (Relative to |
| NO: | Amino Acid Differences | SEQ ID |
| (nt/aa) | (Relative to SEQ ID NO: 414) | NO: 414)¹ |
| 1005/1006 | L149M/E198D/I246M/R260S/A266L/C421S | +++ |
| 1011/1012 | P87L/L149M/R260S/W262F/A266L/C381A | ++ |
| 1001/1002 | N113G/P117K/D146A/L149M/R260S/W262F | ++ |
| 1009/1010 | D146A/L149M/R260S/W262F/C347N | + |
| 1003/1004 | P87G/E145L/L149M/E198D/C447A | + |
| 1007/1008 | P117K/E145L/L149M/N284D/C447A | + |
| 999/1000 | E145L/L149M/E198D/R260S/A266L/ | + |
| | C338G/C347N | |

Levels of increased activity were determined relative to the reference polypeptide of SEQ ID NO: 414 and defined as follows: ″+″ .89 to 1.36, ″++″ > 1.36, ″+++″ > 1.53

### Example 10

### Validation of MAO Activity in Scaled-Down Process Testing of Fermentation Powders

[0305] To a 250-mL 3-neck flask fitted with an overhead stirrer at 300 rpm was added 600 mL of Milli-Q water at about 25° C. and 0.6 mL (approximately 0.5 g; approximately 4.5 mmol) of 6,6-dimethyl-3-azabicyclo[3.1.0]hexane to give a homogeneous solution with pH of 11.8. Na₂S₂O₅ (˜0.5 g) added portion-wise until pH 7.5 was reached. To the colorless solution was added 150 μL of Antifoam-204 (Sigma catalog number A-6226) and 300 μL of bovine catalase solution (20 g/L) to give a colorless solution at pH 7.5. To this solution was added monoamine oxidase powder (produced by fermentation in BL21), furnishing a yellow solution. An air sparging probe was inserted (airflow rate controlled using a mass flow controller at 60 mL/min), and the pH of the reaction mixture began to drop immediately. The pH was maintained via feedback-controlled dosing of 2 N NaOH. After approximately 30 minutes, the pH remained stable, and no further base dosing occurred. After an additional 10 minutes (40 minutes total), 75 mL of 6,6-dimethyl-3-azabicyclo[3.1.0]hexane NaHSO₃ solution (prepared by adding 13.05 g of 6,6-dimethyl-3-azabicyclo[3.1.0]hexane to 82.5 mL of dH₂O and enough Na₂S₂O₅ to reach pH 7.2, about 15g) was added to the reaction at a rate of 3.5 mL/h. The pH of the reaction mixture began to drop immediately, and dosing of 2 N NaOH resumed. The addition of the solution of 6,6-dimethyl-3-azabicyclo[3.1.0]hexane and NaHSO₃ was completed after 22 hours (˜23 hours of total reaction time). A 150 μL aliquot was taken and quenched with 150 μL of 8 N NaOH (to break the aminosulfonate to the free imine) and extracted with 750 μL of CDCl₃. ¹H-NMR analysis of the CDCl₃ extract was used to monitor conversion of the substrate to azabicyclo[3.1.0]hex-2-ene.

TABLE 10.1
Fermentation Powder
Testing in Scaled-Down Process
Reactions

| SEQ ID | Wt % | Percent | |
|---|---|---|---|
| NO: | Powder | Imine | St. Dev. |
| 5/6 | 2 | 75 | 1.4 |
| 413/414 | 2 | 89 | 1.4 |
| 435/436 | 2 | 83 | 2.8 |
| 5/6 | 3 | 86 | 2.1 |
| 413/414 | 3 | 90 | 2.8 |
| 435/436 | 3 | 86 | 2.8 |

[0306] All publications, patents, patent applications and other documents cited in this application are hereby incorporated by reference in their entireties for all purposes to the same extent as if each individual publication, patent, patent application or other document were individually indicated to be incorporated by reference for all purposes.

[0307] While various specific embodiments have been illustrated and described, it will be appreciated that various changes can be made without departing from the spirit and scope of the invention(s).

The application's sequence listing, which the Patent Office published only in electronic form, follows.

SEQUENCE LISTING (1084 sequences)

SEQ ID NO: 1 - DNA, 1485 bp, synthetic construct
  misc_feature 1..1485: note = Homologs of monoamine oxidase
  source 1..1485: mol_type = other DNA
atgaccagccgcgacggctatcagtggaccccggaaacgggtctgacccagggcgtaccgtccctgggtgtcatttcgccgccgactaacatcgaagataccgataaggacgggccttgggatgtcattgtcattgggggcgggtattgtgggctgaccgcaacccgtgatttaaccgtcgcagggttcaagacgctgctgctggaggcccgtgatcgtattggtggccgctcctggagcagtaatattgacggttacccgtatgagatgggtggcacttgggttcattggcatcaatctcacgtgtggcgtgaaatcacgcgttataaaatgcacaacgcgctgtctccatcatttaacttttcacgtggcgtgaatcacttccaactgcgtaccaatccgaccaccagtacgtacatgacgcacgaagcggaggatgaactgctgcgtagcgcattgcataaattcaccaatgtcgacggcactaatggccgtacagtgttgccgttcccacatgatatgttttatgtgccggaatttcgcaagtatgacgaaatgtcatattccgaacgcattgaccagatccgcgacgaactgtctttgaacgaacgctctagtttagaggctttcattttattatgtagcggtggcaccctggaaaactccagctttggtgaatttctgcattggtgggcaatgtcgggttacacgtatcagggctgtatggattgtttaatctcctataaatttaaggatggccagagtgcgttcgcgcgtcgcttctgggaagaagccgctggcactggccgtctgggctatgtctttggttgtccggtgcgttctgtggtgaacgaacgcgacgcagcacgtgttaccgcacgtgacggtcgcgaattcgcagcgaaacgtttggtttgcacgattccgctgaacgtattgagtactattcagtttagcccagcactgtccacggaacgcatctccgctatgcaggcaggccatgttaacatgtgcaccaaagtgcatgcggaagtcgataataaggatatgcgttcatggacgggtatcgcctatccgttcaacaaattatgctacgctatcggcgatggcacgaccccagcgggtaatacgcatctggtgtgcttcgggacagacgcgaatcatatccagccggacgaggacgtgcgcgaaacgttgaaagccgttggccaactggcgcctgggactttcggtgtcaaacgtctggtcttccacaactgggtaaaggatgaatttgccaaaggcgcgtggttcttcagccgcccaggcatggtttcagagtgcctgcagggtctgcgcgagaaacaccgtggtgtcgtgtttgcaaactccgattgggccttaggttggcgtagttttatcgatggtgctatcgaggagggcacccgcgcagcgcgtgttgtactggaggaactggggaccaagcgcgaggtgaaggcccgcctg

SEQ ID NO: 2 - protein, 495 aa, synthetic construct
  REGION 1..495: note = Homologs of monoamine oxidase
MTSRDGYQWTPETGLTQGVPSLGVISPPTNIEDTDKDGPWDVIVIGGGYCGLTATRDLTVAGFKTLLLEARDRIGGRSWSSNIDGYPYEMGGTWVHWHQSHVWREITRYKMHNALSPSFNFSRGVNHFQLRTNPTTSTYMTHEAEDELLRSALHKFTNVDGTNGRTVLPFPHDMFYVPEFRKYDEMSYSERIDQIRDELSLNERSSLEAFILLCSGGTLENSSFGEFLHWWAMSGYTYQGCMDCLISYKFKDGQSAFARRFWEEAAGTGRLGYVFGCPVRSVVNERDAARVTARDGREFAAKRLVCTIPLNVLSTIQFSPALSTERISAMQAGHVNMCTKVHAEVDNKDMRSWTGIAYPFNKLCYAIGDGTTPAGNTHLVCFGTDANHIQPDEDVRETLKAVGQLAPGTFGVKRLVFHNWVKDEFAKGAWFFSRPGMVSECLQGLREKHRGVVFANSDWALGWRSFIDGAIEEGTRAARVVLEELGTKREVKARL

SEQ ID NO: 3 - DNA, 1479 bp, synthetic construct
  misc_feature 1..1479: note = Homologs of monoamine oxidase
  source 1..1479: mol_type = other DNA
atgaccagccgcgacggctatcagtggaccgcgacaacgggtctgcgccagggcgtaccgtccattggtgtcatttcgccgccgactaacgtcttaagtaccactgaggactgggatgtcgttgtcgttggggccgggtattctgggctgaccgcaagccgtgatgcatgcctggcagggttgaaggtgctgctgattgaggcccgtgatcgtattggtggccgctcctggagcagtaatattggcggttacccgtttgagatgggtggcacttggctgtcttggggtcaacctcacatttggcgtgaagtctcgcgttatcaaatgcgcagcgagctggaaccatgctttgacttttcacgtggcgtgaatcacttcgaactgcgtaccggttcgcagggcagttcgatcttttcgcacttagaggaggatgcactgctggctagcgcattggaaaaattcgtcgatgtcgacggcgctatgggccgtcaaattattccgtacccacatgatgcgtttcataacccggcagctcgccagtatgacgatatgtcagctttggatcgcctgaacgcgctggcccagagcctgactccgaacgaacgcgctgttttagagtctttcattttattatgtagctgtggcaccctggaaaccaccagcttttttgaatttctgcattggtgggcactgtgcgattactcgtataagggctgtctgcagcatttaatctcctataaatttaagggtggccagagttcgttcgcgattaaattctttcgtgaatccctgcgcactggccgtctgagctatgcctttaattctccggtgcagtctattaacgaccatggcgaccgtgtagttgttaaaacacgtgacggtcgccaatactcaggggcacgtttgattagcacgattccgctgaacgtattgagttctgttcattttagcccaccactgtccccgcaacgcatggccgctgcgaacattggccatgttaaccagtgcgtcaaagtgcatgcggaagtcagttgtccggatatgcgttcatggtcgggtatctcctatccgttcaacaaattagcctacgctatcggcgatggcacgaccccagcgggtaatacgcatattgtgtgcttcgggggggcccataatcatatccagccggaagaggacgtggaagcaacgaagatggccgttgaaaacatgtcgcctgggaatatggatatcaaacgtctggtcttccacaactggtgcaaggatgaatttgccaaaggcgcgtggttcttcgcccctccacagctgctgtcaaagagcctggatgaactgcgctgccgtcacggtaatgtcctgtttgcaaactccgattgggccgtaggttggcgtagttttatcgatggtgctatcgaggagggcacccgcgcagcggttactgtaattgaggaactgcgtcctgcgcctgcggtgcgttcccacctg

SEQ ID NO: 4 - protein, 493 aa, synthetic construct
  REGION 1..493: note = Homologs of monoamine oxidase
MTSRDGYQWTATTGLRQGVPSIGVISPPTNVLSTTEDWDVVVVGAGYSGLTASRDACLAGLKVLLIEARDRIGGRSWSSNIGGYPFEMGGTWLSWGQPHIWREVSRYQMRSELEPCFDFSRGVNHFELRTGSQGSSIFSHLEEDALLASALEKFVDVDGAMGRQIIPYPHDAFHNPAARQYDDMSALDRLNALAQSLTPNERAVLESFILLCSCGTLETTSFFEFLHWWALCDYSYKGCLQHLISYKFKGGQSSFAIKFFRESLRTGRLSYAFNSPVQSINDHGDRVVVKTRDGRQYSGARLISTIPLNVLSSVHFSPPLSPQRMAAANIGHVNQCVKVHAEVSCPDMRSWSGISYPFNKLAYAIGDGTTPAGNTHIVCFGGAHNHIQPEEDVEATKMAVENMSPGNMDIKRLVFHNWCKDEFAKGAWFFAPPQLLSKSLDELRCRHGNVLFANSDWAVGWRSFIDGAIEEGTRAAVTVIEELRPAPAVRSHL

SEQ ID NO: 5 - DNA, 1485 bp, synthetic construct
  misc_feature 1..1485: note = Variant of monoamine oxidase
  source 1..1485: mol_type = other DNA
atgaccagccgcgacggctatcagtggaccccggaaacgggtctgacccagggcgtaccgtccctgggtgtcatttcgccgccgactaacatcgaagataccgataaggacgggccttgggatgtcattgtcattgggggcgggtattgtgggctgaccgcaacccgtgatttaaccgtcgcagggttcaagacgctgctgctggaggcccgtgatcgtattggtggccgctcctggagcagtaatattgacggttacccgtatgagatgggtggcacttgggttcattggcatcaatctcacgtgtggcgtgaaatcacgcgttataaaatgcacaacgcgctgtctccatcatttaacttttcacgtggcgtgaatcacttccaactgcgtaccaatccgaccaccagtacgtacatgacgcacgaagcggaggatgaactgctgcgtagcgcattgcataaattcaccaatgtcgacggcactaatggccgtacagtgttgccgttcccacatgatatgttttatgtgccggaatttcgcaagtatgacgaaatgtcatattccgaacgcattgaccagatccgcgacgaactgtctttgaacgaacgctctagtttagaggctttcattttattatgtagcggtggcaccctggaaaactccagctttggtgaatttctgcattggtgggcaatgtcgggttacacgtatcagggctgtatggattgtttaatctcctataaatttaaggatggccagagtgcgttcgcgcgtcgcttctgggaagaagccgctggcactggccgtctgggctatgtctttggttgtccggtgcgttctgtggtgaacgaacgcgacgcagtacgtgttaccgcacgtgacggtcgcgaattcgcagcgaaacgtttggtttgcacgattccgctgaacgtattgagttctgttcattttagcccaccactgtccccgcaacgcatggccgctgcgaacattggccatgttaaccagtgcgtcaaagtgcatgcggaagtcagttgtccggatatgcgttcatggtcgggtatctcctatccgttcaacaaattagcctacgctatcggcgatggcacgaccccagcgggtaatacgcatattgtgtgccttgggggggcccataatcatatccagccggaagaggacgtggaagcaacgaagatggccgttgaaaacatgtcgcctgggaatatggatatcaaacgtctggtcttccacaactggtgcaaggatgaatttgccaaaggcgcgtggttcttcgcccctccacagctgctgtcaaagagcctggatgaactgcgctgccgtcacggtaatgtcctgtttgcaaactccgattgggccttaggttggcgtggttttatcgatggtgctatcgaggagggcacccgcgcagcggttactgtaattgaggaactgcgtcctgcgcctgcggtgcgttcccacctg

SEQ ID NO: 6 - protein, 495 aa, synthetic construct
  REGION 1..495: note = Variant of monoamine oxidase
MTSRDGYQWTPETGLTQGVPSLGVISPPTNIEDTDKDGPWDVIVIGGGYCGLTATRDLTVAGFKTLLLEARDRIGGRSWSSNIDGYPYEMGGTWVHWHQSHVWREITRYKMHNALSPSFNFSRGVNHFQLRTNPTTSTYMTHEAEDELLRSALHKFTNVDGTNGRTVLPFPHDMFYVPEFRKYDEMSYSERIDQIRDELSLNERSSLEAFILLCSGGTLENSSFGEFLHWWAMSGYTYQGCMDCLISYKFKDGQSAFARRFWEEAAGTGRLGYVFGCPVRSVVNERDAVRVTARDGREFAAKRLVCTIPLNVLSSVHFSPPLSPQRMAAANIGHVNQCVKVHAEVSCPDMRSWSGISYPFNKLAYAIGDGTTPAGNTHIVCLGGAHNHIQPEEDVEATKMAVENMSPGNMDIKRLVFHNWCKDEFAKGAWFFAPPQLLSKSLDELRCRHGNVLFANSDWALGWRGFIDGAIEEGTRAAVTVIEELRPAPAVRSHL

SEQ ID NO: 7 - DNA, 1485 bp, synthetic construct
  misc_feature 1..1485: note = Variant of monoamine oxidase
  source 1..1485: mol_type = other DNA
atgaccagccgcgacggctatcagtggaccccggaaacgggtctgacccagggcgtaccgtccctgggtgtcatttcgccgccgactaacatcgaagataccgataaggacgggccttgggatgtcattgtcattgggggcgggtattgtgggctgaccgcaacccgtgatttaaccgtcgcagggttcaagacgctgctgctggaggcccgtgatcgtattggtggccgctccgatagcagtaatattgacggttacccgtatgagatgggtggcacttgggttcattggcatcaatctcacgtgtggcgtgaaatcacgcgttataaaatgcacaacgcgctgtctccatcatttaacttttcacgtggcgtgaatcacttccaactgcgtaccaatccgaccaccagtacgtacatgacgcacgaagcggaggatgaactgctgcgtagcgcattgcataaattcaccaatgtcgacggcactaatggccgtacagtgttgccgttcccacatgatatgttttatgtgccggaatttcgcaagtatgacgaaatgtcatattccgaacgcattgaccagatccgcgacgaactgtctttgaacgaacgctctagtttagaggctttcattttattatgtagcggtggcaccctggaaaactccagctttggtgaatttctgcattggtgggcaatgtcgggttacacgtatcagggctgtatggattgtttaatctcctataaatttaaggatggccagagtgcgttcgcgcgtcgcttctgggaagaagccgctggcactggccgtctgggctatgtctttggttgtccggtgcgttctgtggtgaacgaacgcgacgcagtacgtgttaccgcacgtgacggtcgcgaattcgcagcgaaacgtttggtttgcacgattccgctgaacgtattgagttctgttcattttagcccaccactgtccccgcaacgcatggccgctgcgaacattggccatgttaaccagtgcgtcaaagtgcatgcggaagtcagttgtccggatatgcgttcatggtcgggtatctcctatccgttcaacaaattagcctacgctatcggcgatggcacgaccccagcgggtaatacgcatattgtgtgccttgggggggcccataatcatatccagccggaagaggacgtggaagcaacgaagatggccgttgaaaacatgtcgcctgggaatatggatatcaaacgtctggtcttccacaactggtgcaaggatgaatttgccaaaggcgcgtggttcttcgcccctccacagctgctgtcaaagagcctggatgaactgcgctgccgtcacggtaatgtcctgtttgcaaactccgattgggccttaggttggcgtggttttatcgatggtgctatcgaggagggcacccgcgcagcggttactgtaattgaggaactgcgtcctgcgcctgcggtgcgttcccacctg

SEQ ID NO: 8 - protein, 495 aa, synthetic construct
  REGION 1..495: note = Variant of monoamine oxidase
MTSRDGYQWTPETGLTQGVPSLGVISPPTNIEDTDKDGPWDVIVIGGGYCGLTATRDLTVAGFKTLLLEARDRIGGRSDSSNIDGYPYEMGGTWVHWHQSHVWREITRYKMHNALSPSFNFSRGVNHFQLRTNPTTSTYMTHEAEDELLRSALHKFTNVDGTNGRTVLPFPHDMFYVPEFRKYDEMSYSERIDQIRDELSLNERSSLEAFILLCSGGTLENSSFGEFLHWWAMSGYTYQGCMDCLISYKFKDGQSAFARRFWEEAAGTGRLGYVFGCPVRSVVNERDAVRVTARDGREFAAKRLVCTIPLNVLSSVHFSPPLSPQRMAAANIGHVNQCVKVHAEVSCPDMRSWSGISYPFNKLAYAIGDGTTPAGNTHIVCLGGAHNHIQPEEDVEATKMAVENMSPGNMDIKRLVFHNWCKDEFAKGAWFFAPPQLLSKSLDELRCRHGNVLFANSDWALGWRGFIDGAIEEGTRAAVTVIEELRPAPAVRSHL

SEQ ID NO: 9 - DNA, 1485 bp, synthetic construct
  misc_feature 1..1485: note = Variant of monoamine oxidase
  source 1..1485: mol_type = other DNA
atgaccagccgcgacggctatcagtggaccccggaaacgggtctgacccagggcgtaccgtccctgggtgtcatttcgccgccgactaacatcgaagataccgataaggacgggccttgggatgtcattgtcattgggggcgggtattgtgggctgaccgcaacccgtgatttaaccgtcgcagggttcaagacgctgctgctggaggcccgtgatcgtattggtggccgctcctgggtgagtaatattgacggttacccgtatgagatgggtggcacttgggttcattggcatcaatctcacgtgtggcgtgaaatcacgcgttataaaatgcacaacgcgctgtctccatcatttaacttttcacgtggcgtgaatcacttccaactgcgtaccaatccgaccaccagtacgtacatgacgcacgaagcggaggatgaactgctgcgtagcgcattgcataaattcaccaatgtcgacggcactaatggccgtacagtgttgccgttcccacatgatatgttttatgtgccggaatttcgcaagtatgacgaaatgtcatattccgaacgcattgaccagatccgcgacgaactgtctttgaacgaacgctctagtttagaggctttcattttattatgtagcggtggcaccctggaaaactccagctttggtgaatttctgcattggtgggcaatgtcgggttacacgtatcagggctgtatggattgtttaatctcctataaatttaaggatggccagagtgcgttcgcgcgtcgcttctgggaagaagccgctggcactggccgtctgggctatgtctttggttgtccggtgcgttctgtggtgaacgaacgcgacgcagtacgtgttaccgcacgtgacggtcgcgaattcgcagcgaaacgtttggtttgcacgattccgctgaacgtattgagttctgttcattttagcccaccactgtccccgcaacgcatggccgctgcgaacattggccatgttaaccagtgcgtcaaagtgcatgcggaagtcagttgtccggatatgcgttcatggtcgggtatctcctatccgttcaacaaattagcctacgctatcggcgatggcacgaccccagcgggtaatacgcatattgtgtgccttgggggggcccataatcatatccagccggaagaggacgtggaagcaacgaagatggccgttgaaaacatgtcgcctgggaatatggatatcaaacgtctggtcttccacaactggtgcaaggatgaatttgccaaaggcgcgtggttcttcgcccctccacagctgctgtcaaagagcctggatgaactgcgctgccgtcacggtaatgtcctgtttgcaaactccgattgggccttaggttggcgtggttttatcgatggtgctatcgaggagggcacccgcgcagcggttactgtaattgaggaactgcgtcctgcgcctgcggtgcgttcccacctg

SEQ ID NO: 10 - protein, 495 aa, synthetic construct
  REGION 1..495: note = Variant of monoamine oxidase
MTSRDGYQWTPETGLTQGVPSLGVISPPTNIEDTDKDGPWDVIVIGGGYCGLTATRDLTVAGFKTLLLEARDRIGGRSWVSNIDGYPYEMGGTWVHWHQSHVWREITRYKMHNALSPSFNFSRGVNHFQLRTNPTTSTYMTHEAEDELLRSALHKFTNVDGTNGRTVLPFPHDMFYVPEFRKYDEMSYSERIDQIRDELSLNERSSLEAFILLCSGGTLENSSFGEFLHWWAMSGYTYQGCMDCLISYKFKDGQSAFARRFWEEAAGTGRLGYVFGCPVRSVVNERDAVRVTARDGREFAAKRLVCTIPLNVLSSVHFSPPLSPQRMAAANIGHVNQCVKVHAEVSCPDMRSWSGISYPFNKLAYAIGDGTTPAGNTHIVCLGGAHNHIQPEEDVEATKMAVENMSPGNMDIKRLVFHNWCKDEFAKGAWFFAPPQLLSKSLDELRCRHGNVLFANSDWALGWRGFIDGAIEEGTRAAVTVIEELRPAPAVRSHL

SEQ ID NO: 11 - DNA, 1485 bp, synthetic construct
  misc_feature 1..1485: note = Variant of monoamine oxidase
  source 1..1485: mol_type = other DNA
atgaccagccgcgacggctatcagtggaccccggaaacgggtctgacccagggcgtaccgtccctgggtgtcatttcgccgccgactaacatcgaagataccgataaggacgggccttgggatgtcattgtcattgggggcgggtattgtgggctgaccgcaacccgtgatttaaccgtcgcagggttcaagacgctgctgctggaggcccgtgatcgtattggtggccgctcctggagcagtaatattgacggttacgggtatgagatgggtggcacttgggttcattggcatcaatctcacgtgtggcgtgaaatcacgcgttataaaatgcacaacgcgctgtctccatcatttaacttttcacgtggcgtgaatcacttccaactgcgtaccaatccgaccaccagtacgtacatgacgcacgaagcggaggatgaactgctgcgtagcgcattgcataaattcaccaatgtcgacggcactaatggccgtacagtgttgccgttcccacatgatatgttttatgtgccggaatttcgcaagtatgacgaaatgtcatattccgaacgcattgaccagatccgcgacgaactgtctttgaacgaacgctctagtttagaggctttcattttattatgtagcggtggcaccctggaaaactccagctttggtgaatttctgcattggtgggcaatgtcgggttacacgtatcagggctgtatggattgtttaatctcctataaatttaaggatggccagagtgcgttcgcgcgtcgcttctgggaagaagccgctggcactggccgtctgggctatgtctttggttgtccggtgcgttctgtggtgaacgaacgcgacgcagtacgtgttaccgcacgtgacggtcgcgaattcgcagcgaaacgtttggtttgcacgattccgctgaacgtattgagttctgttcattttagcccaccactgtccccgcaacgcatggccgctgcgaacattggccatgttaaccagtgcgtcaaagtgcatgcggaagtcagttgtccggatatgcgttcatggtcgggtatctcctatccgttcaacaaattagcctacgctatcggcgatggcacgaccccagcgggtaatacgcatattgtgtgccttgggggggcccataatcatatccagccggaagaggacgtggaagcaacgaagatggccgttgaaaacatgtcgcctgggaatatggatatcaaacgtctggtcttccacaactggtgcaaggatgaatttgccaaaggcgcgtggttcttcgcccctccacagctgctgtcaaagagcctggatgaactgcgctgccgtcacggtaatgtcctgtttgcaaactccgattgggccttaggttggcgtggttttatcgatggtgctatcgaggagggcacccgcgcagcggttactgtaattgaggaactgcgtcctgcgcctgcggtgcgttcccacctg

SEQ ID NO: 12 - protein, 495 aa, synthetic construct
  REGION 1..495: note = Variant of monoamine oxidase
MTSRDGYQWTPETGLTQGVPSLGVISPPTNIEDTDKDGPWDVIVIGGGYCGLTATRDLTVAGFKTLLLEARDRIGGRSWSSNIDGYGYEMGGTWVHWHQSHVWREITRYKMHNALSPSFNFSRGVNHFQLRTNPTTSTYMTHEAEDELLRSALHKFTNVDGTNGRTVLPFPHDMFYVPEFRKYDEMSYSERIDQIRDELSLNERSSLEAFILLCSGGTLENSSFGEFLHWWAMSGYTYQGCMDCLISYKFKDGQSAFARRFWEEAAGTGRLGYVFGCPVRSVVNERDAVRVTARDGREFAAKRLVCTIPLNVLSSVHFSPPLSPQRMAAANIGHVNQCVKVHAEVSCPDMRSWSGISYPFNKLAYAIGDGTTPAGNTHIVCLGGAHNHIQPEEDVEATKMAVENMSPGNMDIKRLVFHNWCKDEFAKGAWFFAPPQLLSKSLDELRCRHGNVLFANSDWALGWRGFIDGAIEEGTRAAVTVIEELRPAPAVRSHL

SEQ ID NO: 13 - DNA, 1485 bp, synthetic construct
  misc_feature 1..1485: note = Variant of monoamine oxidase
  source 1..1485: mol_type = other DNA
atgaccagccgcgacggctatcagtggaccccggaaacgggtctgacccagggcgtaccgtccctgggtgtcatttcgccgccgactaacatcgaagataccgataaggacgggccttgggatgtcattgtcattgggggcgggtattgtgggctgaccgcaacccgtgatttaaccgtcgcagggttcaagacgctgctgctggaggcccgtgatcgtattggtggccgctcccagagcagtaatattgacggttacccgtatgagatgggtggcacttgggttcattggcatcaatctcacgtgtggcgtgaaatcacgcgttataaaatgcacaacgcgctgtctccatcatttaacttttcacgtggcgtgaatcacttccaactgcgtaccaatccgaccaccagtacgtacatgacgcacgaagcggaggatgaactgctgcgtagcgcattgcataaattcaccaatgtcgacggcactaatggccgtacagtgttgccgttcccacatgatatgttttatgtgccggaatttcgcaagtatgacgaaatgtcatattccgaacgcattgaccagatccgcgacgaactgtctttgaacgaacgctctagtttagaggctttcattttattatgtagcggtggcaccctggaaaactccagctttggtgaatttctgcattggtgggcaatgtcgggttacacgtatcagggctgtatggattgtttaatctcctataaatttaaggatggccagagtgcgttcgcgcgtcgcttctgggaagaagccgctggcactggccgtctgggctatgtctttggttgtccggtgcgttctgtggtgaacgaacgcgacgcagtacgtgttaccgcacgtgacggtcgcgaattcgcagcgaaacgtttggtttgcacgattccgctgaacgtattgagttctgttcattttagcccaccactgtccccgcaacgcatggccgctgcgaacattggccatgttaaccagtgcgtcaaagtgcatgcggaagtcagttgtccggatatgcgttcatggtcgggtatctcctatccgttcaacaaattagcctacgctatcggcgatggcacgaccccagcgggtaatacgcatattgtgtgccttgggggggcccataatcatatccagccggaagaggacgtggaagcaacgaagatggccgttgaaaacatgtcgcctgggaatatggatatcaaacgtctggtcttccacaactggtgcaaggatgaatttgccaaaggcgcgtggttcttcgcccctccacagctgctgtcaaagagcctggatgaactgcgctgccgtcacggtaatgtcctgtttgcaaactccgattgggccttaggttggcgtggttttatcgatggtgctatcgaggagggcacccgcgcagcggttactgtaattgaggaactgcgtcctgcgcctgcggtgcgttcccacctg

SEQ ID NO: 14 - protein, 495 aa, synthetic construct
  REGION 1..495: note = Variant of monoamine oxidase
MTSRDGYQWTPETGLTQGVPSLGVISPPTNIEDTDKDGPWDVIVIGGGYCGLTATRDLTVAGFKTLLLEARDRIGGRSQSSNIDGYPYEMGGTWVHWHQSHVWREITRYKMHNALSPSFNFSRGVNHFQLRTNPTTSTYMTHEAEDELLRSALHKFTNVDGTNGRTVLPFPHDMFYVPEFRKYDEMSYSERIDQIRDELSLNERSSLEAFILLCSGGTLENSSFGEFLHWWAMSGYTYQGCMDCLISYKFKDGQSAFARRFWEEAAGTGRLGYVFGCPVRSVVNERDAVRVTARDGREFAAKRLVCTIPLNVLSSVHFSPPLSPQRMAAANIGHVNQCVKVHAEVSCPDMRSWSGISYPFNKLAYAIGDGTTPAGNTHIVCLGGAHNHIQPEEDVEATKMAVENMSPGNMDIKRLVFHNWCKDEFAKGAWFFAPPQLLSKSLDELRCRHGNVLFANSDWALGWRGFIDGAIEEGTRAAVTVIEELRPAPAVRSHL

SEQ ID NO: 15 - DNA, 1485 bp, synthetic construct
  misc_feature 1..1485: note = Variant of monoamine oxidase
  source 1..1485: mol_type = other DNA
atgaccagccgcgacggctatcagtggaccccggaaacgggtctgacccagggcgtaccgtccctgggtgtcatttcgccgccgactaacatcgaagataccgataaggacgggccttgggatgtcattgtcattgggggcgggtattgtgggctgaccgcaacccgtgatttaaccgtcgcagggttcaagacgctgctgctggaggcccgtgatcgtattggtggccgctcctggagcagtaatattgacggttacctgtatgagatgggtggcacttgggttcattggcatcaatctcacgtgtggcgtgaaatcacgcgttataaaatgcacaacgcgctgtctccatcatttaacttttcacgtggcgtgaatcacttccaactgcgtaccaatccgaccaccagtacgtacatgacgcacgaagcggaggatgaactgctgcgtagcgcattgcataaattcaccaatgtcgacggcactaatggccgtacagtgttgccgttcccacatgatatgttttatgtgccggaatttcgcaagtatgacgaaatgtcatattccgaacgcattgaccagatccgcgacgaactgtctttgaacgaacgctctagtttagaggctttcattttattatgtagcggtggcaccctggaaaactccagctttggtgaatttctgcattggtgggcaatgtcgggttacacgtatcagggctgtatggattgtttaatctcctataaatttaaggatggccagagtgcgttcgcgcgtcgcttctgggaagaagccgctggcactggccgtctgggctatgtctttggttgtccggtgcgttctgtggtgaacgaacgcgacgcagtacgtgttaccgcacgtgacggtcgcgaattcgcagcgaaacgtttggtttgcacgattccgctgaacgtattgagttctgttcattttagcccaccactgtccccgcaacgcatggccgctgcgaacattggccatgttaaccagtgcgtcaaagtgcatgcggaagtcagttgtccggatatgcgttcatggtcgggtatctcctatccgttcaacaaattagcctacgctatcggcgatggcacgaccccagcgggtaatacgcatattgtgtgccttgggggggcccataatcatatccagccggaagaggacgtggaagcaacgaagatggccgttgaaaacatgtcgcctgggaatatggatatcaaacgtctggtcttccacaactggtgcaaggatgaatttgccaaaggcgcgtggttcttcgcccctccacagctgctgtcaaagagcctggatgaactgcgctgccgtcacggtaatgtcctgtttgcaaactccgattgggccttaggttggcgtggttttatcgatggtgctatcgaggagggcacccgcgcagcggttactgtaattgaggaactgcgtcctgcgcctgcggtgcgttcccacctg

SEQ ID NO: 16 - protein, 495 aa, synthetic construct
  REGION 1..495: note = Variant of monoamine oxidase
MTSRDGYQWTPETGLTQGVPSLGVISPPTNIEDTDKDGPWDVIVIGGGYCGLTATRDLTVAGFKTLLLEARDRIGGRSWSSNIDGYLYEMGGTWVHWHQSHVWREITRYKMHNALSPSFNFSRGVNHFQLRTNPTTSTYMTHEAEDELLRSALHKFTNVDGTNGRTVLPFPHDMFYVPEFRKYDEMSYSERIDQIRDELSLNERSSLEAFILLCSGGTLENSSFGEFLHWWAMSGYTYQGCMDCLISYKFKDGQSAFARRFWEEAAGTGRLGYVFGCPVRSVVNERDAVRVTARDGREFAAKRLVCTIPLNVLSSVHFSPPLSPQRMAAANIGHVNQCVKVHAEVSCPDMRSWSGISYPFNKLAYAIGDGTTPAGNTHIVCLGGAHNHIQPEEDVEATKMAVENMSPGNMDIKRLVFHNWCKDEFAKGAWFFAPPQLLSKSLDELRCRHGNVLFANSDWALGWRGFIDGAIEEGTRAAVTVIEELRPAPAVRSHL

SEQ ID NO: 17 - DNA, 1485 bp, synthetic construct
  misc_feature 1..1485: note = Variant of monoamine oxidase
  source 1..1485: mol_type = other DNA
atgaccagccgcgacggctatcagtggaccccggaaacgggtctgacccagggcgtaccgtccctgggtgtcatttcgccgccgactaacatcgaagataccgataaggacgggccttgggatgtcattgtcattgggggcgggtattgtgggctgaccgcaacccgtgatttaaccgtcgcagggttcaagacgctgctgctggaggcccgtgatcgtattggtggccgctcctctagcagtaatattgacggttacccgtatgagatgggtggcacttgggttcattggcatcaatctcacgtgtggcgtgaaatcacgcgttataaaatgcacaacgcgctgtctccatcatttaacttttcacgtggcgtgaatcacttccaactgcgtaccaatccgaccaccagtacgtacatgacgcacgaagcggaggatgaactgctgcgtagcgcattgcataaattcaccaatgtcgacggcactaatggccgtacagtgttgccgttcccacatgatatgttttatgtgccggaatttcgcaagtatgacgaaatgtcatattccgaacgcattgaccagatccgcgacgaactgtctttgaacgaacgctctagtttagaggctttcattttattatgtagcggtggcaccctggaaaactccagctttggtgaatttctgcattggtgggcaatgtcgggttacacgtatcagggctgtatggattgtttaatctcctataaatttaaggatggccagagtgcgttcgcgcgtcgcttctgggaagaagccgctggcactggccgtctgggctatgtctttggttgtccggtgcgttctgtggtgaacgaacgcgacgcagtacgtgttaccgcacgtgacggtcgcgaattcgcagcgaaacgtttggtttgcacgattccgctgaacgtattgagttctgttcattttagcccaccactgtccccgcaacgcatggccgctgcgaacattggccatgttaaccagtgcgtcaaagtgcatgcggaagtcagttgtccggatatgcgttcatggtcgggtatctcctatccgttcaacaaattagcctacgctatcggcgatggcacgaccccagcgggtaatacgcatattgtgtgccttgggggggcccataatcatatccagccggaagaggacgtggaagcaacgaagatggccgttgaaaacatgtcgcctgggaatatggatatcaaacgtctggtcttccacaactggtgcaaggatgaatttgccaaaggcgcgtggttcttcgcccctccacagctgctgtcaaagagcctggatgaactgcgctgccgtcacggtaatgtcctgtttgcaaactccgattgggccttaggttggcgtggttttatcgatggtgctatcgaggagggcacccgcgcagcggttactgtaattgaggaactgcgtcctgcgcctgcggtgcgttcccacctg

SEQ ID NO: 18 - protein, 495 aa, synthetic construct
  REGION 1..495: note = Variant of monoamine oxidase
MTSRDGYQWTPETGLTQGVPSLGVISPPTNIEDTDKDGPWDVIVIGGGYCGLTATRDLTVAGFKTLLLEARDRIGGRSSSSNIDGYPYEMGGTWVHWHQSHVWREITRYKMHNALSPSFNFSRGVNHFQLRTNPTTSTYMTHEAEDELLRSALHKFTNVDGTNGRTVLPFPHDMFYVPEFRKYDEMSYSERIDQIRDELSLNERSSLEAFILLCSGGTLENSSFGEFLHWWAMSGYTYQGCMDCLISYKFKDGQSAFARRFWEEAAGTGRLGYVFGCPVRSVVNERDAVRVTARDGREFAAKRLVCTIPLNVLSSVHFSPPLSPQRMAAANIGHVNQCVKVHAEVSCPDMRSWSGISYPFNKLAYAIGDGTTPAGNTHIVCLGGAHNHIQPEEDVEATKMAVENMSPGNMDIKRLVFHNWCKDEFAKGAWFFAPPQLLSKSLDELRCRHGNVLFANSDWALGWRGFIDGAIEEGTRAAVTVIEELRPAPAVRSHL

SEQ ID NO: 19 - DNA, 1485 bp, synthetic construct
  misc_feature 1..1485: note = Variant of monoamine oxidase
  source 1..1485: mol_type = other DNA
atgaccagccgcgacggctatcagtggaccccggaaacgggtctgacccagggcgtaccgtccctgggtgtcatttcgccgccgactaacatcgaagataccgataaggacgggccttgggatgtcattgtcattgggggcgggtattgtgggctgaccgcaacccgtgatttaaccgtcgcagggttcaagacgctgctgctggaggcccgtgatcgtattggtggccgctcctggagcagtaatattgacggttacccgtatgagatgggtggcacttgggttcattggcatcaatctcacgtgtggcgtgaaatcacgcgttataaaatgcacaacgcgctgtctccatcatttaacttttcacgtggcgtgaatcacttccaactgcgtaccaatccgaccaccagtacgtacatgacgcacgaagcggaggatgaactgctgcgtagcgcattgcataaattcaccaatgtcgacggcactaatggccgtacagtgttgccgttcccacatgatatgttttatgtgccggaatttcgcaagtatgacgaaatgtcatattccgaacgcattgaccagatccgcgacgaactgtctttgaacgaacgctctagtttagaggctttcattttattatgtagcggtggcaccctggaaaactccagctttggtgaatttctgcattggtgggcaatgtcgggttacacgtatcagggctgtatggattgtttaatctcctataaatttaaggatggccagagtgcgttcgcgcgtcgcttctgggaagaagccgctggcactggccgtctgggctatgtctttggttgtccggtgcgttctgtggtgaacgaacgcgacgcagtacgtgttaccgcacgtgacggtcgcgaattcgcagcgaaacgtttggtttgcacgattccgctgaacgtattgagttctgttcattttagcccaccactgtccccgcaacgcatggccgctgcgaacattggccatgttaaccagtgcgtcaaagtgcatgcggaagtcagttgtccggatatgcgttcatggtcgggtatctcctatccgttcaacaaattagcctacgctatcggcgatggcacgaccccagcgggtaatacgcatattgtgtgccttgggggggcccataatcatatccagccggaagaggacgtggaagcaacgaagatggccgttgaaaacatgtcgcctgggaatatggatatcaaacgtctggtcttccacaactggtgcaaggatgaatttgccaaaggcgggtggttcttcgcccctccacagctgctgtcaaagagcctggatgaactgcgctgccgtcacggtaatgtcctgtttgcaaactccgattgggccttaggttggcgtggttttatcgatggtgctatcgaggagggcacccgcgcagcggttactgtaattgaggaactgcgtcctgcgcctgcggtgcgttcccacctg

SEQ ID NO: 20 - protein, 495 aa, synthetic construct
  REGION 1..495: note = Variant of monoamine oxidase
MTSRDGYQWTPETGLTQGVPSLGVISPPTNIEDTDKDGPWDVIVIGGGYCGLTATRDLTVAGFKTLLLEARDRIGGRSWSSNIDGYPYEMGGTWVHWHQSHVWREITRYKMHNALSPSFNFSRGVNHFQLRTNPTTSTYMTHEAEDELLRSALHKFTNVDGTNGRTVLPFPHDMFYVPEFRKYDEMSYSERIDQIRDELSLNERSSLEAFILLCSGGTLENSSFGEFLHWWAMSGYTYQGCMDCLISYKFKDGQSAFARRFWEEAAGTGRLGYVFGCPVRSVVNERDAVRVTARDGREFAAKRLVCTIPLNVLSSVHFSPPLSPQRMAAANIGHVNQCVKVHAEVSCPDMRSWSGISYPFNKLAYAIGDGTTPAGNTHIVCLGGAHNHIQPEEDVEATKMAVENMSPGNMDIKRLVFHNWCKDEFAKGGWFFAPPQLLSKSLDELRCRHGNVLFANSDWALGWRGFIDGAIEEGTRAAVTVIEELRPAPAVRSHL

SEQ ID NO: 21 - DNA, 1485 bp, synthetic construct
  misc_feature 1..1485: note = Variant of monoamine oxidase
  source 1..1485: mol_type = other DNA
atgaccagccgcgacggctatcagtggaccccggaaacgggtctgacccagggcgtaccgtccctgggtgtcatttcgccgccgactaacatcgaagataccgataaggacgggccttgggatgtcattgtcattgggggcgggtattgtgggctgaccgcaacccgtgatttaaccgtcgcagggttcaagacgctgctgctggaggcccgtgatcgtattggtggccgctcctggagcagtaatattgacggttacagttatgagatgggtggcacttgggttcattggcatcaatctcacgtgtggcgtgaaatcacgcgttataaaatgcacaacgcgctgtctccatcatttaacttttcacgtggcgtgaatcacttccaactgcgtaccaatccgaccaccagtacgtacatgacgcacgaagcggaggatgaactgctgcgtagcgcattgcataaattcaccaatgtcgacggcactaatggccgtacagtgttgccgttcccacatgatatgttttatgtgccggaatttcgcaagtatgacgaaatgtcatattccgaacgcattgaccagatccgcgacgaactgtctttgaacgaacgctctagtttagaggctttcattttattatgtagcggtggcaccctggaaaactccagctttggtgaatttctgcattggtgggcaatgtcgggttacacgtatcagggctgtatggattgtttaatctcctataaatttaaggatggccagagtgcgttcgcgcgtcgcttctgggaagaagccgctggcactggccgtctgggctatgtctttggttgtccggtgcgttctgtggtgaacgaacgcgacgcagtacgtgttaccgcacgtgacggtcgcgaattcgcagcgaaacgtttggtttgcacgattccgctgaacgtattgagttctgttcattttagcccaccactgtccccgcaacgcatggccgctgcgaacattggccatgttaaccagtgcgtcaaagtgcatgcggaagtcagttgtccggatatgcgttcatggtcgggtatctcctatccgttcaacaaattagcctacgctatcggcgatggcacgaccccagcgggtaatacgcatattgtgtgccttgggggggcccataatcatatccagccggaagaggacgtggaagcaacgaagatggccgttgaaaacatgtcgcctgggaatatggatatcaaacgtctggtcttccacaactggtgcaaggatgaatttgccaaaggcgcgtggttcttcgcccctccacagctgctgtcaaagagcctggatgaactgcgctgccgtcacggtaatgtcctgtttgcaaactccgattgggccttaggttggcgtggttttatcgatggtgctatcgaggagggcacccgcgcagcggttactgtaattgaggaactgcgtcctgcgcctgcggtgcgttcccacctg

SEQ ID NO: 22 - protein, 495 aa, synthetic construct
  REGION 1..495: note = Variant of monoamine oxidase
MTSRDGYQWTPETGLTQGVPSLGVISPPTNIEDTDKDGPWDVIVIGGGYCGLTATRDLTVAGFKTLLLEARDRIGGRSWSSNIDGYSYEMGGTWVHWHQSHVWREITRYKMHNALSPSFNFSRGVNHFQLRTNPTTSTYMTHEAEDELLRSALHKFTNVDGTNGRTVLPFPHDMFYVPEFRKYDEMSYSERIDQIRDELSLNERSSLEAFILLCSGGTLENSSFGEFLHWWAMSGYTYQGCMDCLISYKFKDGQSAFARRFWEEAAGTGRLGYVFGCPVRSVVNERDAVRVTARDGREFAAKRLVCTIPLNVLSSVHFSPPLSPQRMAAANIGHVNQCVKVHAEVSCPDMRSWSGISYPFNKLAYAIGDGTTPAGNTHIVCLGGAHNHIQPEEDVEATKMAVENMSPGNMDIKRLVFHNWCKDEFAKGAWFFAPPQLLSKSLDELRCRHGNVLFANSDWALGWRGFIDGAIEEGTRAAVTVIEELRPAPAVRSHL

SEQ ID NO: 23 - DNA, 1485 bp, synthetic construct
  misc_feature 1..1485: note = Variant of monoamine oxidase
  source 1..1485: mol_type = other DNA
atgaccagccgcgacggctatcagtggaccccggaaacgggtctgacccagggcgtaccgtccctgggtgtcatttcgccgccgactaacatcgaagataccgataaggacgggccttgggatgtcattgtcattgggggcgggtattgtgggctgaccgcaacccgtgatttaaccgtcgcagggttcaagacgctgctgctggaggcccgtgatcgtattggtggccgctcctggagcagtaatattgacggttacccgtatgagatgggtggcacttgggttcattggcatcaatctcacgtgtggcgtgaaatcacgcgttataaaatgcacaacgcgctgtctccatcatttaacttttcacgtggcgtgaatcacttccaactgcgtaccaatccgaccaccagtacgtacatgacgcacgaagcggaggatgaactgctgcgtagcgcattgcataaattcaccaatgtcgacggcactaatggccgtacagtgttgccgttcccacatgatatgttttatgtgccggaatttcgcaagtatgacgaaatgtcatattccgaacgcattgaccagatccgcgacgaactgtctttgaacgaacgctctagtttagaggctttcattttattatgtagcggtggcaccccggaaaactccagctttggtgaatttctgcattggtgggcaatgtcgggttacacgtatcagggctgtatggattgtttaatctcctataaatttaaggatggccagagtgcgttcgcgcgtcgcttctgggaagaagccgctggcactggccgtctgggctatgtctttggttgtccggtgcgttctgtggtgaacgaacgcgacgcagtacgtgttaccgcacgtgacggtcgcgaattcgcagcgaaacgtttggtttgcacgattccgctgaacgtattgagttctgttcattttagcccaccactgtccccgcaacgcatggccgctgcgaacttgggccatgttaaccagtgcgtcaaagtgcatgcggaagtcagttgtccggatatgcgttcatggtcgggtatctcctatccgttcaacaaattagcctacgctatcggcgatggcacgaccccagcgggtaatacgcatattgtgtgccttgggggggcccataatcatatccagccggaagaggacgtggaagcaacgaagatggccgttgaaaacatgtcgcctgggaatatggatatcaaacgtctggtcttccacaactggtgcaaggatgaatttgccaaaggcgcgtggttcttcgcccctccacagctgctgtcaaagagcctggatgaactgcgctgccgtcacggtaatgtcctgtttgcaaactccgattgggccttaggttggcgtggttttatcgatggtgctatcgaggagggcacccgcgcagcggttactgtaattgaggaactgcgtcctgcgcctgcggtgcgttcccacctg

SEQ ID NO: 24 - protein, 495 aa, synthetic construct
  REGION 1..495: note = Variant of monoamine oxidase
MTSRDGYQWTPETGLTQGVPSLGVISPPTNIEDTDKDGPWDVIVIGGGYCGLTATRDLTVAGFKTLLLEARDRIGGRSWSSNIDGYPYEMGGTWVHWHQSHVWREITRYKMHNALSPSFNFSRGVNHFQLRTNPTTSTYMTHEAEDELLRSALHKFTNVDGTNGRTVLPFPHDMFYVPEFRKYDEMSYSERIDQIRDELSLNERSSLEAFILLCSGGTPENSSFGEFLHWWAMSGYTYQGCMDCLISYKFKDGQSAFARRFWEEAAGTGRLGYVFGCPVRSVVNERDAVRVTARDGREFAAKRLVCTIPLNVLSSVHFSPPLSPQRMAAANLGHVNQCVKVHAEVSCPDMRSWSGISYPFNKLAYAIGDGTTPAGNTHIVCLGGAHNHIQPEEDVEATKMAVENMSPGNMDIKRLVFHNWCKDEFAKGAWFFAPPQLLSKSLDELRCRHGNVLFANSDWALGWRGFIDGAIEEGTRAAVTVIEELRPAPAVRSHL

SEQ ID NO: 25 - DNA, 1485 bp, synthetic construct
  misc_feature 1..1485: note = Variant of monoamine oxidase
  source 1..1485: mol_type = other DNA
atgaccagccgcgacggctatcagtggaccccggaaacgggtctgacccagggcgtaccgtccctgggtgtcatttcgccgccgactaacatcgaagataccgataaggacgggccttgggatgtcattgtcattgggggcgggtattgtgggctgaccgcaacccgtgatttaaccgtcgcagggttcaagacgctgctgctggaggcccgtgatcgtattggtggccgctcctggagcagttttattgacggttacccgtatgagatgggtggcacttgggttcattggcatcaatctcacgtgtggcgtgaaatcacgcgttataaaatgcacaacgcgctgtctccatcatttaacttttcacgtggcgtgaatcacttccaactgcgtaccaatccgaccaccagtacgtacatgacgcacgaagcggaggatgaactgctgcgtagcgcattgcataaattcaccaatgtcgacggcactaatggccgtacagtgttgccgttcccacatgatatgttttatgtgccggaatttcgcaagtatgacgaaatgtcatattccgaacgcattgaccagatccgcgacgaactgtctttgaacgaacgctctagtttagaggctttcattttattatgtagcggtggcaccctggaaaactccagctttggtgaatttctgcattggtgggcaatgtcgggttacacgtatcagggctgtatggattgtttaatctcctataaatttaaggatggccagagtgcgttcgcgcgtcgcttctgggaagaagccgctggcactggccgtctgggctatgtctttggttgtccggtgcgttctgtggtgaacgaacgcgacgcagtacgtgttaccgcacgtgacggtcgcgaattcgcagcgaaacgtttggtttgcacgattccgctgaacgtattgagttctgttcattttagcccaccactgtccccgcaacgcatggccgctgcgaacattggccatgttaaccagtgcgtcaaagtgcatgcggaagtcagttgtccggatatgcgttcatggtcgggtatctcctatccgttcaacaaattagcctacgctatcggcgatggcacgaccccagcgggtaatacgcatattgtgtgccttgggggggcccataatcatatccagccggaagaggacgtggaagcaacgaagatggccgttgaaaacatgtcgcctgggaatatggatatcaaacgtctggtcttccacaactggtgcaaggatgaatttgccaaaggcgcgtggttcttcgcccctccacagctgctgtcaaagagcctggatgaactgcgctgccgtcacggtaatgtcctgtttgcaaactccgattgggccttaggttggcgtggttttatcgatggtgctatcgaggagggcacccgcgcagcggttactgtaattgaggaactgcgtcctgcgcctgcggtgcgttcccacctg

SEQ ID NO: 26 - protein, 495 aa, synthetic construct
  REGION 1..495: note = Variant of monoamine oxidase
MTSRDGYQWTPETGLTQGVPSLGVISPPTNIEDTDKDGPWDVIVIGGGYCGLTATRDLTVAGFKTLLLEARDRIGGRSWSSFIDGYPYEMGGTWVHWHQSHVWREITRYKMHNALSPSFNFSRGVNHFQLRTNPTTSTYMTHEAEDELLRSALHKFTNVDGTNGRTVLPFPHDMFYVPEFRKYDEMSYSERIDQIRDELSLNERSSLEAFILLCSGGTLENSSFGEFLHWWAMSGYTYQGCMDCLISYKFKDGQSAFARRFWEEAAGTGRLGYVFGCPVRSVVNERDAVRVTARDGREFAAKRLVCTIPLNVLSSVHFSPPLSPQRMAAANIGHVNQCVKVHAEVSCPDMRSWSGISYPFNKLAYAIGDGTTPAGNTHIVCLGGAHNHIQPEEDVEATKMAVENMSPGNMDIKRLVFHNWCKDEFAKGAWFFAPPQLLSKSLDELRCRHGNVLFANSDWALGWRGFIDGAIEEGTRAAVTVIEELRPAPAVRSHL

SEQ ID NO: 27 - DNA, 1485 bp, synthetic construct
  misc_feature 1..1485: note = Variant of monoamine oxidase
  source 1..1485: mol_type = other DNA
atgaccagccgcgacggctatcagtggaccccggaaacgggtctgacccagggcgtaccgtccctgggtgtcatttcgccgccgactaacatcgaagataccgataaggacgggccttgggatgtcattgtcattgggggcgggtattgtgggctgaccgcaacccgtgatttaaccgtcgcagggttcaagacgctgctgctggaggcccgtgatcgtattggtggccgctcctggagcagtaatattgacggttactattatgagatgggtggcacttgggttcattggcatcaatctcacgtgtggcgtgaaatcacgcgttataaaatgcacaacgcgctgtctccatcatttaacttttcacgtggcgtgaatcacttccaactgcgtaccaatccgaccaccagtacgtacatgacgcacgaagcggaggatgaactgctgcgtagcgcattgcataaattcaccaatgtcgacggcactaatggccgtacagtgttgccgttcccacatgatatgttttatgtgccggaatttcgcaagtatgacgaaatgtcatattccgaacgcattgaccagatccgcgacgaactgtctttgaacgaacgctctagtttagaggctttcattttattatgtagcggtggcaccctggaaaactccagctttggtgaatttctgcattggtgggcaatgtcgggttacacgtatcagggctgtatggattgtttaatctcctataaatttaaggatggccagagtgcgttcgcgcgtcgcttctgggaagaagccgctggcactggccgtctgggctatgtctttggttgtccggtgcgttctgtggtgaacgaacgcgacgcagtacgtgttaccgcacgtgacggtcgcgaattcgcagcgaaacgtttggtttgcacgattccgctgaacgtattgagttctgttcattttagcccaccactgtccccgcaacgcatggccgctgcgaacattggccatgttaaccagtgcgtcaaagtgcatgcggaagtcagttgtccggatatgcgttcatggtcgggtatctcctatccgttcaacaaattagcctacgctatcggcgatggcacgaccccagcgggtaatacgcatattgtgtgccttgggggggcccataatcatatccagccggaagaggacgtggaagcaacgaagatggccgttgaaaacatgtcgcctgggaatatggatatcaaacgtctggtcttccacaactggtgcaaggatgaatttgccaaaggcgcgtggttcttcgcccctccacagctgctgtcaaagagcctggatgaactgcgctgccgtcacggtaatgtcctgtttgcaaactccgattgggccttaggttggcgtggttttatcgatggtgctatcgaggagggcacccgcgcagcggttactgtaattgaggaactgcgtcctgcgcctgcggtgcgttcccacctg

SEQ ID NO: 28 - protein, 495 aa, synthetic construct
  REGION 1..495: note = Variant of monoamine oxidase
MTSRDGYQWTPETGLTQGVPSLGVISPPTNIEDTDKDGPWDVIVIGGGYCGLTATRDLTVAGFKTLLLEARDRIGGRSWSSNIDGYYYEMGGTWVHWHQSHVWREITRYKMHNALSPSFNFSRGVNHFQLRTNPTTSTYMTHEAEDELLRSALHKFTNVDGTNGRTVLPFPHDMFYVPEFRKYDEMSYSERIDQIRDELSLNERSSLEAFILLCSGGTLENSSFGEFLHWWAMSGYTYQGCMDCLISYKFKDGQSAFARRFWEEAAGTGRLGYVFGCPVRSVVNERDAVRVTARDGREFAAKRLVCTIPLNVLSSVHFSPPLSPQRMAAANIGHVNQCVKVHAEVSCPDMRSWSGISYPFNKLAYAIGDGTTPAGNTHIVCLGGAHNHIQPEEDVEATKMAVENMSPGNMDIKRLVFHNWCKDEFAKGAWFFAPPQLLSKSLDELRCRHGNVLFANSDWALGWRGFIDGAIEEGTRAAVTVIEELRPAPAVRSHL

SEQ ID NO: 29 - DNA, 1485 bp, synthetic construct
  misc_feature 1..1485: note = Variant of monoamine oxidase
  source 1..1485: mol_type = other DNA
atgaccagccgcgacggctatcagtggaccccggaaacgggtctgacccagggcgtaccgtccctgggtgtcatttcgccgccgactaacatcgaagataccgataaggacgggccttgggatgtcattgtcattgggggcgggtattgtgggctgaccgcaacccgtgatttaaccgtcgcagggttcaagacgctgctgctggaggcccgtgatcgtattggtggccgctcctggattagtaatattgacggttacccgtatgagatgggtggcacttgggttcattggcatcaatctcacgtgtggcgtgaaatcacgcgttataaaatgcacaacgcgctgtctccatcatttaacttttcacgtggcgtgaatcacttccaactgcgtaccaatccgaccaccagtacgtacatgacgcacgaagcggaggatgaactgctgcgtagcgcattgcataaattcaccaatgtcgacggcactaatggccgtacagtgttgccgttcccacatgatatgttttatgtgccggaatttcgcaagtatgacgaaatgtcatattccgaacgcattgaccagatccgcgacgaactgtctttgaacgaacgctctagtttagaggctttcattttattatgtagcggtggcaccctggaaaactccagctttggtgaatttctgcattggtgggcaatgtcgggttacacgtatcagggctgtatggattgtttaatctcctataaatttaaggatggccagagtgcgttcgcgcgtcgcttctgggaagaagccgctggcactggccgtctgggctatgtctttggttgtccggtgcgttctgtggtgaacgaacgcgacgcagtacgtgttaccgcacgtgacggtcgcgaattcgcagcgaaacgtttggtttgcacgattccgctgaacgtattgagttctgttcattttagcccaccactgtccccgcaacgcatggccgctgcgaacattggccatgttaaccagtgcgtcaaagtgcatgcggaagtcagttgtccggatatgcgttcatggtcgggtatctcctatccgttcaacaaattagcctacgctatcggcgatggcacgaccccagcgggtaatacgcatattgtgtgccttgggggggcccataatcatatccagccggaagaggacgtggaagcaacgaagatggccgttgaaaacatgtcgcctgggaatatggatatcaaacgtctggtcttccacaactggtgcaaggatgaatttgccaaaggcgcgtggttcttcgcccctccacagctgctgtcaaagagcctggatgaactgcgctgccgtcacggtaatgtcctgtttgcaaactccgattgggccttaggttggcgtggttttatcgatggtgctatcgaggagggcacccgcgcagcggttactgtaattgaggaactgcgtcctgcgcctgcggtgcgttcccacctg

SEQ ID NO: 30 - protein, 495 aa, synthetic construct
  REGION 1..495: note = Variant of monoamine oxidase
MTSRDGYQWTPETGLTQGVPSLGVISPPTNIEDTDKDGPWDVIVIGGGYCGLTATRDLTVAGFKTLLLEARDRIGGRSWISNIDGYPYEMGGTWVHWHQSHVWREITRYKMHNALSPSFNFSRGVNHFQLRTNPTTSTYMTHEAEDELLRSALHKFTNVDGTNGRTVLPFPHDMFYVPEFRKYDEMSYSERIDQIRDELSLNERSSLEAFILLCSGGTLENSSFGEFLHWWAMSGYTYQGCMDCLISYKFKDGQSAFARRFWEEAAGTGRLGYVFGCPVRSVVNERDAVRVTARDGREFAAKRLVCTIPLNVLSSVHFSPPLSPQRMAAANIGHVNQCVKVHAEVSCPDMRSWSGISYPFNKLAYAIGDGTTPAGNTHIVCLGGAHNHIQPEEDVEATKMAVENMSPGNMDIKRLVFHNWCKDEFAKGAWFFAPPQLLSKSLDELRCRHGNVLFANSDWALGWRGFIDGAIEEGTRAAVTVIEELRPAPAVRSHL

SEQ ID NO: 31 - DNA, 1485 bp, synthetic construct
  misc_feature 1..1485: note = Variant of monoamine oxidase
  source 1..1485: mol_type = other DNA
atgaccagccgcgacggctatcagtggaccccggaaacgggtctgacccagggcgtaccgtccctgggtgtcatttcgccgccgactaacatcgaagataccgataaggacgggccttgggatgtcattgtcattgggggcgggtattgtgggctgaccgcaacccgtgatttaaccgtcgcagggttcaagacgctgctgctggaggcccgtgatcgtattggtggccgctccgctagcagtaatattgacggttacccgtatgagatgggtggcacttgggttcattggcatcaatctcacgtgtggcgtgaaatcacgcgttataaaatgcacaacgcgctgtctccatcatttaacttttcacgtggcgtgaatcacttccaactgcgtaccaatccgaccaccagtacgtacatgacgcacgaagcggaggatgaactgctgcgtagcgcattgcataaattcaccaatgtcgacggcactaatggccgtacagtgttgccgttcccacatgatatgttttatgtgccggaatttcgcaagtatgacgaaatgtcatattccgaacgcattgaccagatccgcgacgaactgtctttgaacgaacgctctagtttagaggctttcattttattatgtagcggtggcaccctggaaaactccagctttggtgaatttctgcattggtgggcaatgtcgggttacacgtatcagggctgtatggattgtttaatctcctataaatttaaggatggccagagtgcgttcgcgcgtcgcttctgggaagaagccgctggcactggccgtctgggctatgtctttggttgtccggtgcgttctgtggtgaacgaacgcgacgcagtacgtgttaccgcacgtgacggtcgcgaattcgcagcgaaacgtttggtttgcacgattccgctgaacgtattgagttctgttcattttagcccaccactgtccccgcaacgcatggccgctgcgaacattggccatgttaaccagtgcgtcaaagtgcatgcggaagtcagttgtccggatatgcgttcatggtcgggtatctcctatccgttcaacaaattagcctacgctatcggcgatggcacgaccccagcgggtaatacgcatattgtgtgccttgggggggcccataatcatatccagccggaagaggacgtggaagcaacgaagatggccgttgaaaacatgtcgcctgggaatatggatatcaaacgtctggtcttccacaactggtgcaaggatgaatttgccaaaggcgcgtggttcttcgcccctccacagctgctgtcaaagagcctggatgaactgcgctgccgtcacggtaatgtcctgtttgcaaactccgattgggccttaggttggcgtggttttatcgatggtgctatcgaggagggcacccgcgcagcggttactgtaattgaggaactgcgtcctgcgcctgcggtgcgttcccacctg

SEQ ID NO: 32 - protein, 495 aa, synthetic construct
  REGION 1..495: note = Variant of monoamine oxidase
MTSRDGYQWTPETGLTQGVPSLGVISPPTNIEDTDKDGPWDVIVIGGGYCGLTATRDLTVAGFKTLLLEARDRIGGRSASSNIDGYPYEMGGTWVHWHQSHVWREITRYKMHNALSPSFNFSRGVNHFQLRTNPTTSTYMTHEAEDELLRSALHKFTNVDGTNGRTVLPFPHDMFYVPEFRKYDEMSYSERIDQIRDELSLNERSSLEAFILLCSGGTLENSSFGEFLHWWAMSGYTYQGCMDCLISYKFKDGQSAFARRFWEEAAGTGRLGYVFGCPVRSVVNERDAVRVTARDGREFAAKRLVCTIPLNVLSSVHFSPPLSPQRMAAANIGHVNQCVKVHAEVSCPDMRSWSGISYPFNKLAYAIGDGTTPAGNTHIVCLGGAHNHIQPEEDVEATKMAVENMSPGNMDIKRLVFHNWCKDEFAKGAWFFAPPQLLSKSLDELRCRHGNVLFANSDWALGWRGFIDGAIEEGTRAAVTVIEELRPAPAVRSHL

SEQ ID NO: 33 - DNA, 1485 bp, synthetic construct
  misc_feature 1..1485: note = Variant of monoamine oxidase
  source 1..1485: mol_type = other DNA
atgaccagccgcgacggctatcagtggaccccggaaacgggtctgacccagggcgtaccgtccctgggtgtcatttcgccgccgactaacatcgaagataccgataaggacgggccttgggatgtcattgtcattgggggcgggtattgtgggctgaccgcaacccgtgatttaaccgtcgcagggttcaagacgctgctgctggaggcccgtgatcgtattggtggccgctcctggagcagtaatattgacggttactggtatgagatgggtggcacttgggttcattggcatcaatctcacgtgtggcgtgaaatcacgcgttataaaatgcacaacgcgctgtctccatcatttaacttttcacgtggcgtgaatcacttccaactgcgtaccaatccgaccaccagtacgtacatgacgcacgaagcggaggatgaactgctgcgtagcgcattgcataaattcaccaatgtcgacggcactaatggccgtacagtgttgccgttcccacatgatatgttttatgtgccggaatttcgcaagtatgacgaaatgtcatattccgaacgcattgaccagatccgcgacgaactgtctttgaacgaacgctctagtttagaggctttcattttattatgtagcggtggcaccctggaaaactccagctttggtgaatttctgcattggtgggcaatgtcgggttacacgtatcagggctgtatggattgtttaatctcctataaatttaaggatggccagagtgcgttcgcgcgtcgcttctgggaagaagccgctggcactggccgtctgggctatgtctttggttgtccggtgcgttctgtggtgaacgaacgcgacgcagtacgtgttaccgcacgtgacggtcgcgaattcgcagcgaaacgtttggtttgcacgattccgctgaacgtattgagttctgttcattttagcccaccactgtccccgcaacgcatggccgctgcgaacattggccatgttaaccagtgcgtcaaagtgcatgcggaagtcagttgtccggatatgcgttcatggtcgggtatctcctatccgttcaacaaattagcctacgctatcggcgatggcacgaccccagcgggtaatacgcatattgtgtgccttgggggggcccataatcatatccagccggaagaggacgtggaagcaacgaagatggccgttgaaaacatgtcgcctgggaatatggatatcaaacgtctggtcttccacaactggtgcaaggatgaatttgccaaaggcgcgtggttcttcgcccctccacagctgctgtcaaagagcctggatgaactgcgctgccgtcacggtaatgtcctgtttgcaaactccgattgggccttaggttggcgtggttttatcgatggtgctatcgaggagggcacccgcgcagcggttactgtaattgaggaactgcgtcctgcgcctgcggtgcgttcccacctg

SEQ ID NO: 34 - protein, 495 aa, synthetic construct
  REGION 1..495: note = Variant of monoamine oxidase
MTSRDGYQWTPETGLTQGVPSLGVISPPTNIEDTDKDGPWDVIVIGGGYCGLTATRDLTVAGFKTLLLEARDRIGGRSWSSNIDGYWYEMGGTWVHWHQSHVWREITRYKMHNALSPSFNFSRGVNHFQLRTNPTTSTYMTHEAEDELLRSALHKFTNVDGTNGRTVLPFPHDMFYVPEFRKYDEMSYSERIDQIRDELSLNERSSLEAFILLCSGGTLENSSFGEFLHWWAMSGYTYQGCMDCLISYKFKDGQSAFARRFWEEAAGTGRLGYVFGCPVRSVVNERDAVRVTARDGREFAAKRLVCTIPLNVLSSVHFSPPLSPQRMAAANIGHVNQCVKVHAEVSCPDMRSWSGISYPFNKLAYAIGDGTTPAGNTHIVCLGGAHNHIQPEEDVEATKMAVENMSPGNMDIKRLVFHNWCKDEFAKGAWFFAPPQLLSKSLDELRCRHGNVLFANSDWALGWRGFIDGAIEEGTRAAVTVIEELRPAPAVRSHL

SEQ ID NO: 35 - DNA, 1485 bp, synthetic construct
  misc_feature 1..1485: note = Variant of monoamine oxidase
  source 1..1485: mol_type = other DNA
atgaccagccgcgacggctatcagtggaccccggaaacgggtctgacccagggcgtaccgtccctgggtgtcatttcgccgccgactaacatcgaagataccgataaggacgggccttgggatgtcattgtcattgggggcgggtattgtgggctgaccgcaacccgtgatttaaccgtcgcagggttcaagacgctgctgctggaggcccgtgatcgtattggtggccgctcctggagcagtaatattgacggttacccgtatgagatgggtggcacttgggttcattggcatcaatctcacgtgtggcgtgaaatcacgcgttataaaatgcacaacgcgctgtctccatcatttaacttttcacgtggcgtgaatcacttccaactgcgtaccaatccgaccaccagtacgtacatgacgcacgaagcggaggatgaactgctgcgtagcgcattgcataaattcaccaatgtcgacggcactaatggccgtacagtgttgccgttcccacatgatatgttttatgtgccggaatttcgcaagtatgacgaaatgtcatattccgaacgcattgaccagatccgcgacgaactgtctttgaacgaacgctctagtttagaggctttcattttattatgtagcggtggcaccctggaaaactccagctttggtgaatttctgcattggtgggcaatgtcgggttacacgtatcagggctgtatggattgtttaatctcctataaatttaaggatggccagagtgcgttcgcgcgtagtttctgggaagaagccgctggcactggccgtctgggctatgtctttggttgtccggtgcgttctgtggtgaacgaacgcgacgcagtacgtgttaccgcacgtgacggtcgcgaattcgcagcgaaacgtttggtttgcacgattccgctgaacgtattgagttctgttcattttagcccaccactgtccccgcaacgcatggccgctgcgaacattggccatgttaaccagtgcgtcaaagtgcatgcggaagtcagttgtccggatatgcgttcatggtcgggtatctcctatccgttcaacaaattagcctacgctatcggcgatggcacgaccccagcgggtaatacgcatattgtgtgccttgggggggcccataatcatatccagccggaagaggacgtggaagcaacgaagatggccgttgaaaacatgtcgcctgggaatatggatatcaaacgtctggtcttccacaactggtgcaaggatgaatttgccaaaggcgcgtggttcttcgcccctccacagctgctgtcaaagagcctggatgaactgcgctgccgtcacggtaatgtcctgtttgcaaactccgattgggccttaggttggcgtggttttatcgatggtgctatcgaggagggcacccgcgcagcggttactgtaattgaggaactgcgtcctgcgcctgcggtgcgttcccacctg

SEQ ID NO: 36 - protein, 495 aa, synthetic construct
  REGION 1..495: note = Variant of monoamine oxidase
MTSRDGYQWTPETGLTQGVPSLGVISPPTNIEDTDKDGPWDVIVIGGGYCGLTATRDLTVAGFKTLLLEARDRIGGRSWSSNIDGYPYEMGGTWVHWHQSHVWREITRYKMHNALSPSFNFSRGVNHFQLRTNPTTSTYMTHEAEDELLRSALHKFTNVDGTNGRTVLPFPHDMFYVPEFRKYDEMSYSERIDQIRDELSLNERSSLEAFILLCSGGTLENSSFGEFLHWWAMSGYTYQGCMDCLISYKFKDGQSAFARSFWEEAAGTGRLGYVFGCPVRSVVNERDAVRVTARDGREFAAKRLVCTIPLNVLSSVHFSPPLSPQRMAAANIGHVNQCVKVHAEVSCPDMRSWSGISYPFNKLAYAIGDGTTPAGNTHIVCLGGAHNHIQPEEDVEATKMAVENMSPGNMDIKRLVFHNWCKDEFAKGAWFFAPPQLLSKSLDELRCRHGNVLFANSDWALGWRGFIDGAIEEGTRAAVTVIEELRPAPAVRSHL

SEQ ID NO: 37 - DNA, 1485 bp, synthetic construct
  misc_feature 1..1485: note = Variant of monoamine oxidase
  source 1..1485: mol_type = other DNA
atgaccagccgcgacggctatcagtggaccccggaaacgggtctgacccagggcgtaccgtccctgggtgtcatttcgccgccgactaacatcgaagataccgataaggacgggccttgggatgtcattgtcattgggggcgggtattgtgggctgaccgcaacccgtgatttaaccgtcgcagggttcaagacgctgctgctggaggcccgtgatcgtattggtggccgctcctggcatagtaatattgacggttacccgtatgagatgggtggcacttgggttcattggcatcaatctcacgtgtggcgtgaaatcacgcgttataaaatgcacaacgcgctgtctccatcatttaacttttcacgtggcgtgaatcacttccaactgcgtaccaatccgaccaccagtacgtacatgacgcacgaagcggaggatgaactgctgcgtagcgcattgcataaattcaccaatgtcgacggcactaatggccgtacagtgttgccgttcccacatgatatgttttatgtgccggaatttcgcaagtatgacgaaatgtcatattccgaacgcattgaccagatccgcgacgaactgtctttgaacgaacgctctagtttagaggctttcattttattatgtagcggtggcaccctggaaaactccagctttggtgaatttctgcattggtgggcaatgtcgggttacacgtatcagggctgtatggattgtttaatctcctataaatttaaggatggccagagtgcgttcgcgcgtcgcttctgggaagaagccgctggcactggccgtctgggctatgtctttggttgtccggtgcgttctgtggtgaacgaacgcgacgcagtacgtgttaccgcacgtgacggtcgcgaattcgcagcgaaacgtttggtttgcacgattccgctgaacgtattgagttctgttcattttagcccaccactgtccccgcaacgcatggccgctgcgaacattggccatgttaaccagtgcgtcaaagtgcatgcggaagtcagttgtccggatatgcgttcatggtcgggtatctcctatccgttcaacaaattagcctacgctatcggcgatggcacgaccccagcgggtaatacgcatattgtgtgccttgggggggcccataatcatatccagccggaagaggacgtggaagcaacgaagatggccgttgaaaacatgtcgcctgggaatatggatatcaaacgtctggtcttccacaactggtgcaaggatgaatttgccaaaggcgcgtggttcttcgcccctccacagctgctgtcaaagagcctggatgaactgcgctgccgtcacggtaatgtcctgtttgcaaactccgattgggccttaggttggcgtggttttatcgatggtgctatcgaggagggcacccgcgcagcggttactgtaattgaggaactgcgtcctgcgcctgcggtgcgttcccacctg

SEQ ID NO: 38 - protein, 495 aa, synthetic construct
  REGION 1..495: note = Variant of monoamine oxidase
MTSRDGYQWTPETGLTQGVPSLGVISPPTNIEDTDKDGPWDVIVIGGGYCGLTATRDLTVAGFKTLLLEARDRIGGRSWHSNIDGYPYEMGGTWVHWHQSHVWREITRYKMHNALSPSFNFSRGVNHFQLRTNPTTSTYMTHEAEDELLRSALHKFTNVDGTNGRTVLPFPHDMFYVPEFRKYDEMSYSERIDQIRDELSLNERSSLEAFILLCSGGTLENSSFGEFLHWWAMSGYTYQGCMDCLISYKFKDGQSAFARRFWEEAAGTGRLGYVFGCPVRSVVNERDAVRVTARDGREFAAKRLVCTIPLNVLSSVHFSPPLSPQRMAAANIGHVNQCVKVHAEVSCPDMRSWSGISYPFNKLAYAIGDGTTPAGNTHIVCLGGAHNHIQPEEDVEATKMAVENMSPGNMDIKRLVFHNWCKDEFAKGAWFFAPPQLLSKSLDELRCRHGNVLFANSDWALGWRGFIDGAIEEGTRAAVTVIEELRPAPAVRSHL

SEQ ID NO: 39 - DNA, 1485 bp, synthetic construct
  misc_feature 1..1485: note = Variant of monoamine oxidase
  source 1..1485: mol_type = other DNA
atgaccagccgcgacggctatcagtggaccccggaaacgggtctgacccagggcgtaccgtccctgggtgtcatttcgccgccgactaacatcgaagataccgataaggacgggccttgggatgtcattgtcattgggggcgggtattgtgggctgaccgcaacccgtgatttaaccgtcgcagggttcaagacgctgctgctggaggcccgtgatcgtattggtggccgctcctggaatagtaatattgacggttacccgtatgagatgggtggcacttgggttcattggcatcaatctcacgtgtggcgtgaaatcacgcgttataaaatgcacaacgcgctgtctccatcatttaacttttcacgtggcgtgaatcacttccaactgcgtaccaatccgaccaccagtacgtacatgacgcacgaagcggaggatgaactgctgcgtagcgcattgcataaattcaccaatgtcgacggcactaatggccgtacagtgttgccgttcccacatgatatgttttatgtgccggaatttcgcaagtatgacgaaatgtcatattccgaacgcattgaccagatccgcgacgaactgtctttgaacgaacgctctagtttagaggctttcattttattatgtagcggtggcaccctggaaaactccagctttggtgaatttctgcattggtgggcaatgtcgggttacacgtatcagggctgtatggattgtttaatctcctataaatttaaggatggccagagtgcgttcgcgcgtcgcttctgggaagaagccgctggcactggccgtctgggctatgtctttggttgtccggtgcgttctgtggtgaacgaacgcgacgcagtacgtgttaccgcacgtgacggtcgcgaattcgcagcgaaacgtttggtttgcacgattccgctgaacgtattgagttctgttcattttagcccaccactgtccccgcaacgcatggccgctgcgaacattggccatgttaaccagtgcgtcaaagtgcatgcggaagtcagttgtccggatatgcgttcatggtcgggtatctcctatccgttcaacaaattagcctacgctatcggcgatggcacgaccccagcgggtaatacgcatattgtgtgccttgggggggcccataatcatatccagccggaagaggacgtggaagcaacgaagatggccgttgaaaacatgtcgcctgggaatatggatatcaaacgtctggtcttccacaactggtgcaaggatgaatttgccaaaggcgcgtggttcttcgcccctccacagctgctgtcaaagagcctggatgaactgcgctgccgtcacggtaatgtcctgtttgcaaactccgattgggccttaggttggcgtggttttatcgatggtgctatcgaggagggcacccgcgcagcggttactgtaattgaggaactgcgtcctgcgcctgcggtgcgttcccacctg

SEQ ID NO: 40 - protein, 495 aa, synthetic construct
  REGION 1..495: note = Variant of monoamine oxidase
MTSRDGYQWTPETGLTQGVPSLGVISPPTNIEDTDKDGPWDVIVIGGGYCGLTATRDLTVAGFKTLLLEARDRIGGRSWNSNIDGYPYEMGGTWVHWHQSHVWREITRYKMHNALSPSFNFSRGVNHFQLRTNPTTSTYMTHEAEDELLRSALHKFTNVDGTNGRTVLPFPHDMFYVPEFRKYDEMSYSERIDQIRDELSLNERSSLEAFILLCSGGTLENSSFGEFLHWWAMSGYTYQGCMDCLISYKFKDGQSAFARRFWEEAAGTGRLGYVFGCPVRSVVNERDAVRVTARDGREFAAKRLVCTIPLNVLSSVHFSPPLSPQRMAAANIGHVNQCVKVHAEVSCPDMRSWSGISYPFNKLAYAIGDGTTPAGNTHIVCLGGAHNHIQPEEDVEATKMAVENMSPGNMDIKRLVFHNWCKDEFAKGAWFFAPPQLLSKSLDELRCRHGNVLFANSDWALGWRGFIDGAIEEGTRAAVTVIEELRPAPAVRSHL

SEQ ID NO: 41 - DNA, 1485 bp, synthetic construct
  misc_feature 1..1485: note = Variant of monoamine oxidase
  source 1..1485: mol_type = other DNA
atgaccagccgcgacggctatcagtggaccccggaaacgggtctgacccagggcgtaccgtccctgggtgtcatttcgccgccgactaacatcgaagataccgataaggacgggccttgggatgtcattgtcattgggggcgggtattgtgggctgaccgcaacccgtgatttaaccgtcgcagggttcaagacgctgctgctggaggcccgtgatcgtattggtggccgctcctggagcagtaatattgacggttacccgtatgagatgggtggcacttgggttcattggcatcaatctcacgtgtggcgtgaaatcacgcgttataaaatgcacaacgcgctgtctccatcatttaacttttcacgtggcgtgaatcacttccaactgcgtaccaatccgaccaccagtacgtacatgacgcacgaagcggaggatgaactgctgcgtagcgcattgcataaattcaccaatgtcgacggcactaatggccgtacagtgttgccgttcccacatgatatgttttatgtgccggaatttcgcaagtatgacgaaatgtcatattccgaacgcattgaccagatccgcgacgaactgtctttgaacgaacgctctagtttagaggctttcattttattatgtagcggtggcaccctggaaaactccagctttggtgaatttctgcattggtgggcaatgtcgggttacacgtatcagggctgtatggattgtttaatctcctataaagtgaaggatggccagagtgcgttcgcgcgtcgcttctgggaagaagccgctggcactggccgtctgggctatgtctttggttgtccggtgcgttctgtggtgaacgaacgcgacgcagtacgtgttaccgcacgtgacggtcgcgaattcgcagcgaaacgtttggtttgcacgattccgctgaacgtattgagttctgttcattttagcccaccactgtccccgcaacgcatggccgctgcgaacattggccatgttaaccagtgcgtcaaagtgcatgcggaagtcagttgtccggatatgcgttcatggtcgggtatctcctatccgttcaacaaattagcctacgctatcggcgatggcacgaccccagcgggtaatacgcatattgtgtgccttgggggggcccataatcatatccagccggaagaggacgtggaagcaacgaagatggccgttgaaaacatgtcgcctgggaatatggatatcaaacgtctggtcttccacaactggtgcaaggatgaatttgccaaaggcgcgtggttcttcgcccctccacagctgctgtcaaagagcctggatgaactgcgctgccgtcacggtaatgtcctgtttgcaaactccgattgggccttaggttggcgtggttttatcgatggtgctatcgaggagggcacccgcgcagcggttactgtaattgaggaactgcgtcctgcgcctgcggtgcgttcccacctg

SEQ ID NO: 42 - protein, 495 aa, synthetic construct
  REGION 1..495: note = Variant of monoamine oxidase
MTSRDGYQWTPETGLTQGVPSLGVISPPTNIEDTDKDGPWDVIVIGGGYCGLTATRDLTVAGFKTLLLEARDRIGGRSWSSNIDGYPYEMGGTWVHWHQSHVWREITRYKMHNALSPSFNFSRGVNHFQLRTNPTTSTYMTHEAEDELLRSALHKFTNVDGTNGRTVLPFPHDMFYVPEFRKYDEMSYSERIDQIRDELSLNERSSLEAFILLCSGGTLENSSFGEFLHWWAMSGYTYQGCMDCLISYKVKDGQSAFARRFWEEAAGTGRLGYVFGCPVRSVVNERDAVRVTARDGREFAAKRLVCTIPLNVLSSVHFSPPLSPQRMAAANIGHVNQCVKVHAEVSCPDMRSWSGISYPFNKLAYAIGDGTTPAGNTHIVCLGGAHNHIQPEEDVEATKMAVENMSPGNMDIKRLVFHNWCKDEFAKGAWFFAPPQLLSKSLDELRCRHGNVLFANSDWALGWRGFIDGAIEEGTRAAVTVIEELRPAPAVRSHL

SEQ ID NO: 43 - DNA, 1485 bp, synthetic construct
  misc_feature 1..1485: note = Variant of monoamine oxidase
  source 1..1485: mol_type = other DNA
atgaccagccgcgacggctatcagtggaccccggaaacgggtctgacccagggcgtaccgtccctgggtgtcatttcgccgccgactaacatcgaagataccgataaggacgggccttgggatgtcattgtcattgggggcgggtattgtgggctgaccgcaacccgtgatttaaccgtcgcagggttcaagacgctgctgctggaggcccgtgatcgtattggtggccgctcctggagcagtaatattgacggttaccattatgagatgggtggcacttgggttcattggcatcaatctcacgtgtggcgtgaaatcacgcgttataaaatgcacaacgcgctgtctccatcatttaacttttcacgtggcgtgaatcacttccaactgcgtaccaatccgaccaccagtacgtacatgacgcacgaagcggaggatgaactgctgcgtagcgcattgcataaattcaccaatgtcgacggcactaatggccgtacagtgttgccgttcccacatgatatgttttatgtgccggaatttcgcaagtatgacgaaatgtcatattccgaacgcattgaccagatccgcgacgaactgtctttgaacgaacgctctagtttagaggctttcattttattatgtagcggtggcaccctggaaaactccagctttggtgaatttctgcattggtgggcaatgtcgggttacacgtatcagggctgtatggattgtttaatctcctataaatttaaggatggccagagtgcgttcgcgcgtcgcttctgggaagaagccgctggcactggccgtctgggctatgtctttggttgtccggtgcgttctgtggtgaacgaacgcgacgcagtacgtgttaccgcacgtgacggtcgcgaattcgcagcgaaacgtttggtttgcacgattccgctgaacgtattgagttctgttcattttagcccaccactgtccccgcaacgcatggccgctgcgaacattggccatgttaaccagtgcgtcaaagtgcatgcggaagtcagttgtccggatatgcgttcatggtcgggtatctcctatccgttcaacaaattagcctacgctatcggcgatggcacgaccccagcgggtaatacgcatattgtgtgccttgggggggcccataatcatatccagccggaagaggacgtggaagcaacgaagatggccgttgaaaacatgtcgcctgggaatatggatatcaaacgtctggtcttccacaactggtgcaaggatgaatttgccaaaggcgcgtggttcttcgcccctccacagctgctgtcaaagagcctggatgaactgcgctgccgtcacggtaatgtcctgtttgcaaactccgattgggccttaggttggcgtggttttatcgatggtgctatcgaggagggcacccgcgcagcggttactgtaattgaggaactgcgtcctgcgcctgcggtgcgttcccacctg

SEQ ID NO: 44 - protein, 495 aa, synthetic construct
  REGION 1..495: note = Variant of monoamine oxidase
MTSRDGYQWTPETGLTQGVPSLGVISPPTNIEDTDKDGPWDVIVIGGGYCGLTATRDLTVAGFKTLLLEARDRIGGRSWSSNIDGYHYEMGGTWVHWHQSHVWREITRYKMHNALSPSFNFSRGVNHFQLRTNPTTSTYMTHEAEDELLRSALHKFTNVDGTNGRTVLPFPHDMFYVPEFRKYDEMSYSERIDQIRDELSLNERSSLEAFILLCSGGTLENSSFGEFLHWWAMSGYTYQGCMDCLISYKFKDGQSAFARRFWEEAAGTGRLGYVFGCPVRSVVNERDAVRVTARDGREFAAKRLVCTIPLNVLSSVHFSPPLSPQRMAAANIGHVNQCVKVHAEVSCPDMRSWSGISYPFNKLAYAIGDGTTPAGNTHIVCLGGAHNHIQPEEDVEATKMAVENMSPGNMDIKRLVFHNWCKDEFAKGAWFFAPPQLLSKSLDELRCRHGNVLFANSDWALGWRGFIDGAIEEGTRAAVTVIEELRPAPAVRSHL

SEQ ID NO: 45 - DNA, 1485 bp, synthetic construct
  misc_feature 1..1485: note = Variant of monoamine oxidase
  source 1..1485: mol_type = other DNA
atgaccagccgcgacggctatcagtggaccccggaaacgggtctgacccagggcgtaccgtccctgggtgtcatttcgccgccgactaacatcgaagataccgataaggacgggccttgggatgtcattgtcattgggggcgggtattgtgggctgaccgcaacccgtgatttaaccgtcgcagggttcaagacgctgctgctggaggcccgtgatcgtattggtggccgctcctggagcagtaatattgacggttacccgtatgagatgggtggcacttgggttcattggcatcaatctcacgtgtggcgtgaaatcacgcgttataaaatgcacaacgcgctgtctccatcatttaacttttcacgtggcgtgaatcacttccaactgcgtaccaatccgaccaccagtacgtacatgacgcacgaagcggaggatgaactgctgcgtagcgcattgcataaattcaccaatgtcgacggcactaatggccgtacagtgttgccgttcccacatgatatgttttatgtgccggaatttcgcaagtattttgaaatgtcatattccgaacgcattgaccagatccgcgacgaactgtctttgaacgaacgctctagtttagaggctttcattttattatgtagcggtggcaccctggaaaactccagctttggtgaatttctgcattggtgggcaatgtcgggttacacgtatcagggctgtatggattgtttaatctcctataaatttaaggatggccagagtgcgttcgcgcgtcgcttctgggaagaagccgctggcactggccgtctgggctatgtctttggttgtccggtgcgttctgtggtgaacgaacgcgacgcagtacgtgttaccgcacgtgacggtcgcgaattcgcagcgaaacgtttggtttgcacgattccgctgaacgtattgagttctgttcattttagcccaccactgtccccgcaacgcatggccgctgcgaacattggccatgttaaccagtgcgtcaaagtgcatgcggaagtcagttgtccggatatgcgttcatggtcgggtatctcctatccgttcaacaaattagcctacgctatcggcgatggcacgaccccagcgggtaatacgcatattgtgtgccttgggggggcccataatcatatccagccggaagaggacgtggaagcaacgaagatggccgttgaaaacatgtcgcctgggaatatggatatcaaacgtctggtcttccacaactggtgcaaggatgaatttgccaaaggcgcgtggttcttcgcccctccacagctgctgtcaaagagcctggatgaactgcgctgccgtcacggtaatgtcctgtttgcaaactccgattgggccttaggttggcgtggttttatcgatggtgctatcgaggagggcacccgcgcagcggttactgtaattgaggaactgcgtcctgcgcctgcggtgcgttcccacctg

SEQ ID NO: 46 - protein, 495 aa, synthetic construct
  REGION 1..495: note = Variant of monoamine oxidase
MTSRDGYQWTPETGLTQGVPSLGVISPPTNIEDTDKDGPWDVIVIGGGYCGLTATRDLTVAGFKTLLLEARDRIGGRSWSSNIDGYPYEMGGTWVHWHQSHVWREITRYKMHNALSPSFNFSRGVNHFQLRTNPTTSTYMTHEAEDELLRSALHKFTNVDGTNGRTVLPFPHDMFYVPEFRKYFEMSYSERIDQIRDELSLNERSSLEAFILLCSGGTLENSSFGEFLHWWAMSGYTYQGCMDCLISYKFKDGQSAFARRFWEEAAGTGRLGYVFGCPVRSVVNERDAVRVTARDGREFAAKRLVCTIPLNVLSSVHFSPPLSPQRMAAANIGHVNQCVKVHAEVSCPDMRSWSGISYPFNKLAYAIGDGTTPAGNTHIVCLGGAHNHIQPEEDVEATKMAVENMSPGNMDIKRLVFHNWCKDEFAKGAWFFAPPQLLSKSLDELRCRHGNVLFANSDWALGWRGFIDGAIEEGTRAAVTVIEELRPAPAVRSHL

SEQ ID NO: 47 - DNA, 1485 bp, synthetic construct
  misc_feature 1..1485: note = Variant of monoamine oxidase
  source 1..1485: mol_type = other DNA
atgaccagccgcgacggctatcagtggaccccggaaacgggtctgacccagggcgtaccgtccctgggtgtcatttcgccgccgactaacatcgaagataccgataaggacgggccttgggatgtcattgtcattgggggcgggtattgtgggctgaccgcaacccgtgatttaaccgtcgcagggttcaagacgctgctgctggaggcccgtgatcgtattggtggccgctcctggagcagtaatattgacggttacccgtatgagatgggtggcacttgggttcattggcatcaatctcacgtgtggcgtgaaatcacgcgttataaaatgcacaacgcgctgtctccatcatttaacttttcacgtggcgtgaatcacttccaactgcgtaccaatccgaccaccagtacgtacatgacgcacgaagcggaggcggaactgctgcgtagcgcattgcataaattcaccaatgtcgacggcactaatggccgtacagtgttgccgttcccacatgatatgttttatgtgccggaatttcgcaagtatgacgaaatgtcatattccgaacgcattgaccagatccgcgacgaactgtctttgaacgaacgctctagtttagaggctttcattttattatgtagcggtggcaccctggaaaactccagctttggtgaatttctgcattggtgggcaatgtcgggttacacgtatcagggctgtatggattgtttaatctcctataaatttaaggatggccagagtgcgttcgcgcgtcgcttctgggaagaagccgctggcactggccgtctgggctatgtctttggttgtccggtgcgttctgtggtgaacgaacgcgacgcagtacgtgttaccgcacgtgacggtcgcgaattcgcagcgaaacgtttggtttgcacgattccgctgaacgtattgagttctgttcattttagcccaccactgtccccgcaacgcatggccgctgcgaacattggccatgttaaccagtgcgtcaaagtgcatgcggaagtcagttgtccggatatgcgttcatggtcgggtatctcctatccgttcaacaaattagcctacgctatcggcgatggcacgaccccagcgggtaatacgcatattgtgtgccttgggggggcccataatcatatccagccggaagaggacgtggaagcaacgaagatggccgttgaaaacatgtcgcctgggaatatggatatcaaacgtctggtcttccacaactggtgcaaggatgaatttgccaaaggcgcgtggttcttcgcccctccacagctgctgtcaaagagcctggatgaactgcgctgccgtcacggtaatgtcctgtttgcaaactccgattgggccttaggttggcgtggttttatcgatggtgctatcgaggagggcacccgcgcagcggttactgtaattgaggaactgcgtcctgcgcctgcggtgcgttcccacctg

SEQ ID NO: 48 - protein, 495 aa, synthetic construct
  REGION 1..495: note = Variant of monoamine oxidase
MTSRDGYQWTPETGLTQGVPSLGVISPPTNIEDTDKDGPWDVIVIGGGYCGLTATRDLTVAGFKTLLLEARDRIGGRSWSSNIDGYPYEMGGTWVHWHQSHVWREITRYKMHNALSPSFNFSRGVNHFQLRTNPTTSTYMTHEAEAELLRSALHKFTNVDGTNGRTVLPFPHDMFYVPEFRKYDEMSYSERIDQIRDELSLNERSSLEAFILLCSGGTLENSSFGEFLHWWAMSGYTYQGCMDCLISYKFKDGQSAFARRFWEEAAGTGRLGYVFGCPVRSVVNERDAVRVTARDGREFAAKRLVCTIPLNVLSSVHFSPPLSPQRMAAANIGHVNQCVKVHAEVSCPDMRSWSGISYPFNKLAYAIGDGTTPAGNTHIVCLGGAHNHIQPEEDVEATKMAVENMSPGNMDIKRLVFHNWCKDEFAKGAWFFAPPQLLSKSLDELRCRHGNVLFANSDWALGWRGFIDGAIEEGTRAAVTVIEELRPAPAVRSHL

SEQ ID NO: 49 - DNA, 1485 bp, synthetic construct
  misc_feature 1..1485: note = Variant of monoamine oxidase
  source 1..1485: mol_type = other DNA
atgaccagccgcgacggctatcagtggaccccggaaacgggtctgacccagggcgtaccgtccctgggtgtcatttcgccgccgactaacatcgaagataccgataaggacgggccttgggatgtcattgtcattgggggcgggtattgtgggctgaccgcaacccgtgatttaaccgtcgcagggttcaagacgctgctgctggaggcccgtgatcgtattggtggccgctcctggagcagtaatattgacggttacccgtatgagatgggtggcacttgggttcattggcatcaatctcacgtgtggcgtgaaatcacgcgttataaaatgcacaacgcgctgtctccatcatttaacttttcacgtggcgtgaatcacttccaactgcgtaccaatccgaccaccagtacgtacatgacgcacgaagcggaggatgaactgctgcgtagcgcattgcataaattcaccaatgtcgacggcactaatggccgtacagtgttgccgttcccacatgatatgttttatgtgccggaatttcgcaagtatagggaaatgtcatattccgaacgcattgaccagatccgcgacgaactgtctttgaacgaacgctctagtttagaggctttcattttattatgtagcggtggcaccctggaaaactccagctttggtgaatttctgcattggtgggcaatgtcgggttacacgtatcagggctgtatggattgtttaatctcctataaatttaaggatggccagagtgcgttcgcgcgtcgcttctgggaagaagccgctggcactggccgtctgggctatgtctttggttgtccggtgcgttctgtggtgaacgaacgcgacgcagtacgtgttaccgcacgtgacggtcgcgaattcgcagcgaaacgtttggtttgcacgattccgctgaacgtattgagttctgttcattttagcccaccactgtccccgcaacgcatggccgctgcgaacattggccatgttaaccagtgcgtcaaagtgcatgcggaagtcagttgtccggatatgcgttcatggtcgggtatctcctatccgttcaacaaattagcctacgctatcggcgatggcacgaccccagcgggtaatacgcatattgtgtgccttgggggggcccataatcatatccagccggaagaggacgtggaagcaacgaagatggccgttgaaaacatgtcgcctgggaatatggatatcaaacgtctggtcttccacaactggtgcaaggatgaatttgccaaaggcgcgtggttcttcgcccctccacagctgctgtcaaagagcctggatgaactgcgctgccgtcacggtaatgtcctgtttgcaaactccgattgggccttaggttggcgtggttttatcgatggtgctatcgaggagggcacccgcgcagcggttactgtaattgaggaactgcgtcctgcgcctgcggtgcgttcccacctg

SEQ ID NO: 50 - protein, 495 aa, synthetic construct
  REGION 1..495: note = Variant of monoamine oxidase
MTSRDGYQWTPETGLTQGVPSLGVISPPTNIEDTDKDGPWDVIVIGGGYCGLTATRDLTVAGFKTLLLEARDRIGGRSWSSNIDGYPYEMGGTWVHWHQSHVWREITRYKMHNALSPSFNFSRGVNHFQLRTNPTTSTYMTHEAEDELLRSALHKFTNVDGTNGRTVLPFPHDMFYVPEFRKYREMSYSERIDQIRDELSLNERSSLEAFILLCSGGTLENSSFGEFLHWWAMSGYTYQGCMDCLISYKFKDGQSAFARRFWEEAAGTGRLGYVFGCPVRSVVNERDAVRVTARDGREFAAKRLVCTIPLNVLSSVHFSPPLSPQRMAAANIGHVNQCVKVHAEVSCPDMRSWSGISYPFNKLAYAIGDGTTPAGNTHIVCLGGAHNHIQPEEDVEATKMAVENMSPGNMDIKRLVFHNWCKDEFAKGAWFFAPPQLLSKSLDELRCRHGNVLFANSDWALGWRGFIDGAIEEGTRAAVTVIEELRPAPAVRSHL

SEQ ID NO: 51 - DNA, 1485 bp, synthetic construct
  misc_feature 1..1485: note = Variant of monoamine oxidase
  source 1..1485: mol_type = other DNA
atgaccagccgcgacggctatcagtggaccccggaaacgggtctgacccagggcgtaccgtccctgggtgtcatttcgccgccgactaacatcgaagataccgataaggacgggccttgggatgtcattgtcattgggggcgggtattgtgggctgaccgcaacccgtgatttaaccgtcgcagggttcaagacgctgctgctggaggcccgtgatcgtattggtggccgctcctggagcagtaatattgacggttacccgtatgagatgggtggcacttgggttcattggcatcaatctcacgtgtggcgtgaaatcacgcgttataaaatgcacaacgcgctgtctccatcatttaacttttcacgtggcgtgaatcacttccaactgcgtaccaatccgaccaccagtacgtacatgacgcacgaagcggaggatgaactgctgcgtagcgcattgcataaattcaccaatgtcgacggcactaatggccgtacagtgttgccgttcccacatgatatgttttatgtgccggaatttcgcaagtatgacgaaatgtcatattccgaacgcattgaccagatccgcgacgaactgtctttgaacgaacgctctagtttagaggctttcattttattatgtagcggtggcaccctggaaaactccagctttggtgaatttctgcattggtgggcaatgtcgggttacacgaagcagggctgtatggattgtttaatctcctataaatttaaggatggccagagtgcgttcgcgcgtcgcttctgggaagaagccgctggcactggccgtctgggctatgtctttggttgtccggtgcgttctgtggtgaacgaacgcgacgcagtacgtgttaccgcacgtgacggtcgcgaattcgcagcgaaacgtttggtttgcacgattccgctgaacgtattgagttctgttcattttagcccaccactgtccccgcaacgcatggccgctgcgaacattggccatgttaaccagtgcgtcaaagtgcatgcggaagtcagttgtccggatatgcgttcatggtcgggtatctcctatccgttcaacaaattagcctacgctatcggcgatggcacgaccccagcgggtaatacgcatattgtgtgccttgggggggcccataatcatatccagccggaagaggacgtggaagcaacgaagatggccgttgaaaacatgtcgcctgggaatatggatatcaaacgtctggtcttccacaactggtgcaaggatgaatttgccaaaggcgcgtggttcttcgcccctccacagctgctgtcaaagagcctggatgaactgcgctgccgtcacggtaatgtcctgtttgcaaactccgattgggccttaggttggcgtggttttatcgatggtgctatcgaggagggcacccgcgcagcggttactgtaattgaggaactgcgtcctgcgcctgcggtgcgttcccacctg

SEQ ID NO: 52 - protein, 495 aa, synthetic construct
  REGION 1..495: note = Variant of monoamine oxidase
MTSRDGYQWTPETGLTQGVPSLGVISPPTNIEDTDKDGPWDVIVIGGGYCGLTATRDLTVAGFKTLLLEARDRIGGRSWSSNIDGYPYEMGGTWVHWHQSHVWREITRYKMHNALSPSFNFSRGVNHFQLRTNPTTSTYMTHEAEDELLRSALHKFTNVDGTNGRTVLPFPHDMFYVPEFRKYDEMSYSERIDQIRDELSLNERSSLEAFILLCSGGTLENSSFGEFLHWWAMSGYTKQGCMDCLISYKFKDGQSAFARRFWEEAAGTGRLGYVFGCPVRSVVNERDAVRVTARDGREFAAKRLVCTIPLNVLSSVHFSPPLSPQRMAAANIGHVNQCVKVHAEVSCPDMRSWSGISYPFNKLAYAIGDGTTPAGNTHIVCLGGAHNHIQPEEDVEATKMAVENMSPGNMDIKRLVFHNWCKDEFAKGAWFFAPPQLLSKSLDELRCRHGNVLFANSDWALGWRGFIDGAIEEGTRAAVTVIEELRPAPAVRSHL

SEQ ID NO: 53 - DNA, 1485 bp, synthetic construct
  misc_feature 1..1485: note = Variant of monoamine oxidase
  source 1..1485: mol_type = other DNA
atgaccagccgcgacggctatcagtggaccccggaaacgggtctgacccagggcgtaccgtccctgggtgtcatttcgccgccgactaacatcgaagataccgataaggacgggccttgggatgtcattgtcattgggggcgggtattgtgggctgaccgcaacccgtgatttaaccgtcgcagggttcaagacgctgctgctggaggcccgtgatcgtattggtggccgctcctggagcagtcgtattgacggttacccgtatgagatgggtggcacttgggttcattggcatcaatctcacgtgtggcgtgaaatcacgcgttataaaatgcacaacgcgctgtctccatcatttaacttttcacgtggcgtgaatcacttccaactgcgtaccaatccgaccaccagtacgtacatgacgcacgaagcggaggatgaactgctgcgtagcgcattgcataaattcaccaatgtcgacggcactaatggccgtacagtgttgccgttcccacatgatatgttttatgtgccggaatttcgcaagtatgacgaaatgtcatattccgaacgcattgaccagatccgcgacgaactgtctttgaacgaacgctctagtttagaggctttcattttattatgtagcggtggcaccctggaaaactccagctttggtgaatttctgcattggtgggcaatgtcgggttacacgtatcagggctgtatggattgtttaatctcctataaatttaaggatggccagagtgcgttcgcgcgtcgcttctgggaagaagccgctggcactggccgtctgggctatgtctttggttgtccggtgcgttctgtggtgaacgaacgcgacgcagtacgtgttaccgcacgtgacggtcgcgaattcgcagcgaaacgtttggtttgcacgattccgctgaacgtattgagttctgttcattttagcccaccactgtccccgcaacgcatggccgctgcgaacattggccatgttaaccagtgcgtcaaagtgcatgcggaagtcagttgtccggatatgcgttcatggtcgggtatctcctatccgttcaacaaattagcctacgctatcggcgatggcacgaccccagcgggtaatacgcatattgtgtgccttgggggggcccataatcatatccagccggaagaggacgtggaagcaacgaagatggccgttgaaaacatgtcgcctgggaatatggatatcaaacgtctggtcttccacaactggtgcaaggatgaatttgccaaaggcgcgtggttcttcgcccctccacagctgctgtcaaagagcctggatgaactgcgctgccgtcacggtaatgtcctgtttgcaaactccgattgggccttaggttggcgtggttttatcgatggtgctatcgaggagggcacccgcgcagcggttactgtaattgaggaactgcgtcctgcgcctgcggtgcgttcccacctg

SEQ ID NO: 54 - protein, 495 aa, synthetic construct
  REGION 1..495: note = Variant of monoamine oxidase
MTSRDGYQWTPETGLTQGVPSLGVISPPTNIEDTDKDGPWDVIVIGGGYCGLTATRDLTVAGFKTLLLEARDRIGGRSWSSRIDGYPYEMGGTWVHWHQSHVWREITRYKMHNALSPSFNFSRGVNHFQLRTNPTTSTYMTHEAEDELLRSALHKFTNVDGTNGRTVLPFPHDMFYVPEFRKYDEMSYSERIDQIRDELSLNERSSLEAFILLCSGGTLENSSFGEFLHWWAMSGYTYQGCMDCLISYKFKDGQSAFARRFWEEAAGTGRLGYVFGCPVRSVVNERDAVRVTARDGREFAAKRLVCTIPLNVLSSVHFSPPLSPQRMAAANIGHVNQCVKVHAEVSCPDMRSWSGISYPFNKLAYAIGDGTTPAGNTHIVCLGGAHNHIQPEEDVEATKMAVENMSPGNMDIKRLVFHNWCKDEFAKGAWFFAPPQLLSKSLDELRCRHGNVLFANSDWALGWRGFIDGAIEEGTRAAVTVIEELRPAPAVRSHL

SEQ ID NO: 55 - DNA, 1485 bp, synthetic construct
  misc_feature 1..1485: note = Variant of monoamine oxidase
  source 1..1485: mol_type = other DNA
atgaccagccgcgacggctatcagtggaccccggaaacgggtctgacccagggcgtaccgtccctgggtgtcatttcgccgccgactaacatcgaagataccgataaggacgggccttgggatgtcattgtcattgggggcgggtattgtgggctgaccgcaacccgtgatttaaccgtcgcagggttcaagacgctgctgctggaggcccgtgatcgtattggtggccgctcctggagcagtaatattgacggttacccgtatgagatgggtggcacttgggttcattggcatcaatctcacgtgtggcgtgaaatcacgcgttataaaatgcacaacgcgctgtctccatcatttaacttttcacgtggcgtgaatcacttccaactgcgtaccaatccgaccaccagtacgtacatgacgcacgaagcggaggatgaactgctgcgtagcgcattgcataaattcaccaatgtcgacggcactaatggccgtacagtgttgccgttcccacatgatatgttttatgtgccggaatttcgcaagtatgacgaaatgtcatattccgaacgcattgaccagatccgcgacgaactgtctttgaacgaacgctctagtttagaggctttcattttattatgtagcggtggcaccctggaaaactccagctttggtgaatttctgcattggtgggcaatgtcgggttacacgtatcagggctgtatggattgtttaatctcctataaatttaaggatggccagagtgcgttcgcgcgtcgcttctgggaagaagccgctggcactggccgtctgggctatgtctttggttgtccggtgcgttctgtggtgaacgaacgcgacgcagtacgtgttaccgcacgtgacggtcgcgaattcgcagcgaaacgtttggtttgcacgattccgctgaacgtattgagttctgttcattttagcccaccactgtccccgcaacgcatggccgctgcgaacgggggccatgttaaccagtgcgtcaaagtgcatgcggaagtcagttgtccggatatgcgttcatggtcgggtatctcctatccgttcaacaaattagcctacgctatcggcgatggcacgaccccagcgggtaatacgcatattgtgtgccttgggggggcccataatcatatccagccggaagaggacgtggaagcaacgaagatggccgttgaaaacatgtcgcctgggaatatggatatcaaacgtctggtcttccacaactggtgcaaggatgaatttgccaaaggcgcgtggttcttcgcccctccacagctgctgtcaaagagcctggatgaactgcgctgccgtcacggtaatgtcctgtttgcaaactccgattgggccttaggttggcgtggttttatcgatggtgctatcgaggagggcacccgcgcagcggttactgtaattgaggaactgcgtcctgcgcctgcggtgcgttcccacctg

SEQ ID NO: 56 - protein, 495 aa, synthetic construct
  REGION 1..495: note = Variant of monoamine oxidase
MTSRDGYQWTPETGLTQGVPSLGVISPPTNIEDTDKDGPWDVIVIGGGYCGLTATRDLTVAGFKTLLLEARDRIGGRSWSSNIDGYPYEMGGTWVHWHQSHVWREITRYKMHNALSPSFNFSRGVNHFQLRTNPTTSTYMTHEAEDELLRSALHKFTNVDGTNGRTVLPFPHDMFYVPEFRKYDEMSYSERIDQIRDELSLNERSSLEAFILLCSGGTLENSSFGEFLHWWAMSGYTYQGCMDCLISYKFKDGQSAFARRFWEEAAGTGRLGYVFGCPVRSVVNERDAVRVTARDGREFAAKRLVCTIPLNVLSSVHFSPPLSPQRMAAANGGHVNQCVKVHAEVSCPDMRSWSGISYPFNKLAYAIGDGTTPAGNTHIVCLGGAHNHIQPEEDVEATKMAVENMSPGNMDIKRLVFHNWCKDEFAKGAWFFAPPQLLSKSLDELRCRHGNVLFANSDWALGWRGFIDGAIEEGTRAAVTVIEELRPAPAVRSHL

SEQ ID NO: 57 - DNA, 1485 bp, synthetic construct
  misc_feature 1..1485: note = Variant of monoamine oxidase
  source 1..1485: mol_type = other DNA
atgaccagccgcgacggctatcagtggaccccggaaacgggtctgacccagggcgtaccgtccctgggtgtcatttcgccgccgactaacatcgaagataccgataaggacgggccttgggatgtcattgtcattgggggcgggtattgtgggctgaccgcaacccgtgatttaaccgtcgcagggttcaagacgctgctgctggaggcccgtgatcgtattggtggccgctcctggagcagttggattgacggttacccgtatgagatgggtggcacttgggttcattggcatcaatctcacgtgtggcgtgaaatcacgcgttataaaatgcacaacgcgctgtctccatcatttaacttttcacgtggcgtgaatcacttccaactgcgtaccaatccgaccaccagtacgtacatgacgcacgaagcggaggatgaactgctgcgtagcgcattgcataaattcaccaatgtcgacggcactaatggccgtacagtgttgccgttcccacatgatatgttttatgtgccggaatttcgcaagtatgacgaaatgtcatattccgaacgcattgaccagatccgcgacgaactgtctttgaacgaacgctctagtttagaggctttcattttattatgtagcggtggcaccctggaaaactccagctttggtgaatttctgcattggtgggcaatgtcgggttacacgtatcagggctgtatggattgtttaatctcctataaatttaaggatggccagagtgcgttcgcgcgtcgcttctgggaagaagccgctggcactggccgtctgggctatgtctttggttgtccggtgcgttctgtggtgaacgaacgcgacgcagtacgtgttaccgcacgtgacggtcgcgaattcgcagcgaaacgtttggtttgcacgattccgctgaacgtattgagttctgttcattttagcccaccactgtccccgcaacgcatggccgctgcgaacattggccatgttaaccagtgcgtcaaagtgcatgcggaagtcagttgtccggatatgcgttcatggtcgggtatctcctatccgttcaacaaattagcctacgctatcggcgatggcacgaccccagcgggtaatacgcatattgtgtgccttgggggggcccataatcatatccagccggaagaggacgtggaagcaacgaagatggccgttgaaaacatgtcgcctgggaatatggatatcaaacgtctggtcttccacaactggtgcaaggatgaatttgccaaaggcgcgtggttcttcgcccctccacagctgctgtcaaagagcctggatgaactgcgctgccgtcacggtaatgtcctgtttgcaaactccgattgggccttaggttggcgtggttttatcgatggtgctatcgaggagggcacccgcgcagcggttactgtaattgaggaactgcgtcctgcgcctgcggtgcgttcccacctg

SEQ ID NO: 58 - protein, 495 aa, synthetic construct
  REGION 1..495: note = Variant of monoamine oxidase
MTSRDGYQWTPETGLTQGVPSLGVISPPTNIEDTDKDGPWDVIVIGGGYCGLTATRDLTVAGFKTLLLEARDRIGGRSWSSWIDGYPYEMGGTWVHWHQSHVWREITRYKMHNALSPSFNFSRGVNHFQLRTNPTTSTYMTHEAEDELLRSALHKFTNVDGTNGRTVLPFPHDMFYVPEFRKYDEMSYSERIDQIRDELSLNERSSLEAFILLCSGGTLENSSFGEFLHWWAMSGYTYQGCMDCLISYKFKDGQSAFARRFWEEAAGTGRLGYVFGCPVRSVVNERDAVRVTARDGREFAAKRLVCTIPLNVLSSVHFSPPLSPQRMAAANIGHVNQCVKVHAEVSCPDMRSWSGISYPFNKLAYAIGDGTTPAGNTHIVCLGGAHNHIQPEEDVEATKMAVENMSPGNMDIKRLVFHNWCKDEFAKGAWFFAPPQLLSKSLDELRCRHGNVLFANSDWALGWRGFIDGAIEEGTRAAVTVIEELRPAPAVRSHL

SEQ ID NO: 59 - DNA, 1485 bp, synthetic construct
  misc_feature 1..1485: note = Variant of monoamine oxidase
  source 1..1485: mol_type = other DNA
atgaccagccgcgacggctatcagtggaccccggaaacgggtctgacccagggcgtaccgtccctgggtgtcatttcgccgccgactaacatcgaagataccgataaggacgggccttgggatgtcattgtcattgggggcgggtattgtgggctgaccgcaacccgtgatttaaccgtcgcagggttcaagacgctgctgctggaggcccgtgatcgtattggtggccgctcctggagcagtaatattgacggttacccgtatgagatgggtggcacttgggttcattggcatcaatctcacgtgtggcgtgaaatcacgcgttataaaatgcacaacgcgctgtctccatcatttaacttttcacgtggcgtgaatcacttccaactgcgtaccaatccgaccaccagtacgtacatgacgcacgaagcggaggatgaactgctgcgtagcgcattgcataaattcaccaatgtcgacggcactaatggccgtacagtgttgccgttcccacatgatatgttttatgtgccggaatttcgcaagtatgacgaaatgtcatattccgaacgcattgaccagatccgcgacgaactgtctttgaacgaacgctctagtttagaggctttcattttattatgtagcggtggcaccctggaaaactccagctttggtgaatttctgcattggtgggcaatgtcgggttacacgaggcagggctgtatggattgtttaatctcctataaatttaaggatggccagagtgcgttcgcgcgtcgcttctgggaagaagccgctggcactggccgtctgggctatgtctttggttgtccggtgcgttctgtggtgaacgaacgcgacgcagtacgtgttaccgcacgtgacggtcgcgaattcgcagcgaaacgtttggtttgcacgattccgctgaacgtattgagttctgttcattttagcccaccactgtccccgcaacgcatggccgctgcgaacattggccatgttaaccagtgcgtcaaagtgcatgcggaagtcagttgtccggatatgcgttcatggtcgggtatctcctatccgttcaacaaattagcctacgctatcggcgatggcacgaccccagcgggtaatacgcatattgtgtgccttgggggggcccataatcatatccagccggaagaggacgtggaagcaacgaagatggccgttgaaaacatgtcgcctgggaatatggatatcaaacgtctggtcttccacaactggtgcaaggatgaatttgccaaaggcgcgtggttcttcgcccctccacagctgctgtcaaagagcctggatgaactgcgctgccgtcacggtaatgtcctgtttgcaaactccgattgggccttaggttggcgtggttttatcgatggtgctatcgaggagggcacccgcgcagcggttactgtaattgaggaactgcgtcctgcgcctgcggtgcgttcccacctg

SEQ ID NO: 60 - protein, 495 aa, synthetic construct
  REGION 1..495: note = Variant of monoamine oxidase
MTSRDGYQWTPETGLTQGVPSLGVISPPTNIEDTDKDGPWDVIVIGGGYCGLTATRDLTVAGFKTLLLEARDRIGGRSWSSNIDGYPYEMGGTWVHWHQSHVWREITRYKMHNALSPSFNFSRGVNHFQLRTNPTTSTYMTHEAEDELLRSALHKFTNVDGTNGRTVLPFPHDMFYVPEFRKYDEMSYSERIDQIRDELSLNERSSLEAFILLCSGGTLENSSFGEFLHWWAMSGYTRQGCMDCLISYKFKDGQSAFARRFWEEAAGTGRLGYVFGCPVRSVVNERDAVRVTARDGREFAAKRLVCTIPLNVLSSVHFSPPLSPQRMAAANIGHVNQCVKVHAEVSCPDMRSWSGISYPFNKLAYAIGDGTTPAGNTHIVCLGGAHNHIQPEEDVEATKMAVENMSPGNMDIKRLVFHNWCKDEFAKGAWFFAPPQLLSKSLDELRCRHGNVLFANSDWALGWRGFIDGAIEEGTRAAVTVIEELRPAPAVRSHL

SEQ ID NO: 61 - DNA, 1485 bp, synthetic construct
  misc_feature 1..1485: note = Variant of monoamine oxidase
  source 1..1485: mol_type = other DNA
atgaccagccgcgacggctatcagtggaccccggaaacgggtctgacccagggcgtaccgtccctgggtgtcatttcgccgccgactaacatcgaagataccgataaggacgggccttgggatgtcattgtcattgggggcgggtattgtgggctgaccgcaacccgtgatttaaccgtcgcagggttcaagacgctgctgctggaggcccgtgatcgtattggtggccgctcctggagcagtaatattgacggttacccgtatgagatgggtggcacttgggttcattggcatcaatctcacgtgtggcgtgaaatcacgcgttataaaatgcacaacgcgctgtctccatcatttaacttttcacgtggcgtgaatcacttccaactgcgtaccaatccgaccaccagtacgtacatgacgcacgaagcggagtttgaactgctgcgtagcgcattgcataaattcaccaatgtcgacggcactaatggccgtacagtgttgccgttcccacatgatatgttttatgtgccggaatttcgcaagtatgacgaaatgtcatattccgaacgcattgaccagatccgcgacgaactgtctttgaacgaacgctctagtttagaggctttcattttattatgtagcggtggcaccctggaaaactccagctttggtgaatttctgcattggtgggcaatgtcgggttacacgtatcagggctgtatggattgtttaatctcctataaatttaaggatggccagagtgcgttcgcgcgtcgcttctgggaagaagccgctggcactggccgtctgggctatgtctttggttgtccggtgcgttctgtggtgaacgaacgcgacgcagtacgtgttaccgcacgtgacggtcgcgaattcgcagcgaaacgtttggtttgcacgattccgctgaacgtattgagttctgttcattttagcccaccactgtccccgcaacgcatggccgctgcgaacattggccatgttaaccagtgcgtcaaagtgcatgcggaagtcagttgtccggatatgcgttcatggtcgggtatctcctatccgttcaacaaattagcctacgctatcggcgatggcacgaccccagcgggtaatacgcatattgtgtgccttgggggggcccataatcatatccagccggaagaggacgtggaagcaacgaagatggccgttgaaaacatgtcgcctgggaatatggatatcaaacgtctggtcttccacaactggtgcaaggatgaatttgccaaaggcgcgtggttcttcgcccctccacagctgctgtcaaagagcctggatgaactgcgctgccgtcacggtaatgtcctgtttgcaaactccgattgggccttaggttggcgtggttttatcgatggtgctatcgaggagggcacccgcgcagcggttactgtaattgaggaactgcgtcctgcgcctgcggtgcgttcccacctg

SEQ ID NO: 62 - protein, 495 aa, synthetic construct
  REGION 1..495: note = Variant of monoamine oxidase
MTSRDGYQWTPETGLTQGVPSLGVISPPTNIEDTDKDGPWDVIVIGGGYCGLTATRDLTVAGFKTLLLEARDRIGGRSWSSNIDGYPYEMGGTWVHWHQSHVWREITRYKMHNALSPSFNFSRGVNHFQLRTNPTTSTYMTHEAEFELLRSALHKFTNVDGTNGRTVLPFPHDMFYVPEFRKYDEMSYSERIDQIRDELSLNERSSLEAFILLCSGGTLENSSFGEFLHWWAMSGYTYQGCMDCLISYKFKDGQSAFARRFWEEAAGTGRLGYVFGCPVRSVVNERDAVRVTARDGREFAAKRLVCTIPLNVLSSVHFSPPLSPQRMAAANIGHVNQCVKVHAEVSCPDMRSWSGISYPFNKLAYAIGDGTTPAGNTHIVCLGGAHNHIQPEEDVEATKMAVENMSPGNMDIKRLVFHNWCKDEFAKGAWFFAPPQLLSKSLDELRCRHGNVLFANSDWALGWRGFIDGAIEEGTRAAVTVIEELRPAPAVRSHL

SEQ ID NO: 63 - DNA, 1485 bp, synthetic construct
  misc_feature 1..1485: note = Variant of monoamine oxidase
  source 1..1485: mol_type = other DNA
atgaccagccgcgacggctatcagtggaccccggaaacgggtctgacccagggcgtaccgtccctgggtgtcatttcgccgccgactaacatcgaagataccgataaggacgggccttgggatgtcattgtcattgggggcgggtattgtgggctgaccgcaacccgtgatttaaccgtcgcagggttcaagacgctgctgctggaggcccgtgatcgtattggtggccgctcctggagcagtaatattgacggttacccgtatgagatgggtggcacttgggttcattggcatcaatctcacgtgtggcgtgaaatcacgcgttataaaatgcacaacgcgctgtctccatcatttaacttttcacgtggcgtgaatcacttccaactgcgtaccaatccgaccaccagtacgtacatgacgcacgaagcggaggatgaactgatgcgtagcgcattgcataaattcaccaatgtcgacggcactaatggccgtacagtgttgccgttcccacatgatatgttttatgtgccggaatttcgcaagtatgacgaaatgtcatattccgaacgcattgaccagatccgcgacgaactgtctttgaacgaacgctctagtttagaggctttcattttattatgtagcggtggcaccctggaaaactccagctttggtgaatttctgcattggtgggcaatgtcgggttacacgtatcagggctgtatggattgtttaatctcctataaatttaaggatggccagagtgcgttcgcgcgtcgcttctgggaagaagccgctggcactggccgtctgggctatgtctttggttgtccggtgcgttctgtggtgaacgaacgcgacgcagtacgtgttaccgcacgtgacggtcgcgaattcgcagcgaaacgtttggtttgcacgattccgctgaacgtattgagttctgttcattttagcccaccactgtccccgcaacgcatggccgctgcgaacattggccatgttaaccagtgcgtcaaagtgcatgcggaagtcagttgtccggatatgcgttcatggtcgggtatctcctatccgttcaacaaattagcctacgctatcggcgatggcacgaccccagcgggtaatacgcatattgtgtgccttgggggggcccataatcatatccagccggaagaggacgtggaagcaacgaagatggccgttgaaaacatgtcgcctgggaatatggatatcaaacgtctggtcttccacaactggtgcaaggatgaatttgccaaaggcgcgtggttcttcgcccctccacagctgctgtcaaagagcctggatgaactgcgctgccgtcacggtaatgtcctgtttgcaaactccgattgggccttaggttggcgtggttttatcgatggtgctatcgaggagggcacccgcgcagcggttactgtaattgaggaactgcgtcctgcgcctgcggtgcgttcccacctg

SEQ ID NO: 64 - protein, 495 aa, synthetic construct
  REGION 1..495: note = Variant of monoamine oxidase
MTSRDGYQWTPETGLTQGVPSLGVISPPTNIEDTDKDGPWDVIVIGGGYCGLTATRDLTVAGFKTLLLEARDRIGGRSWSSNIDGYPYEMGGTWVHWHQSHVWREITRYKMHNALSPSFNFSRGVNHFQLRTNPTTSTYMTHEAEDELMRSALHKFTNVDGTNGRTVLPFPHDMFYVPEFRKYDEMSYSERIDQIRDELSLNERSSLEAFILLCSGGTLENSSFGEFLHWWAMSGYTYQGCMDCLISYKFKDGQSAFARRFWEEAAGTGRLGYVFGCPVRSVVNERDAVRVTARDGREFAAKRLVCTIPLNVLSSVHFSPPLSPQRMAAANIGHVNQCVKVHAEVSCPDMRSWSGISYPFNKLAYAIGDGTTPAGNTHIVCLGGAHNHIQPEEDVEATKMAVENMSPGNMDIKRLVFHNWCKDEFAKGAWFFAPPQLLSKSLDELRCRHGNVLFANSDWALGWRGFIDGAIEEGTRAAVTVIEELRPAPAVRSHL

SEQ ID NO: 65 - DNA, 1485 bp, synthetic construct
  misc_feature 1..1485: note = Variant of monoamine oxidase
  source 1..1485: mol_type = other DNA
atgaccagccgcgacggctatcagtggaccccggaaacgggtctgacccagggcgtaccgtccctgggtgtcatttcgccgccgactaacatcgaagataccgataaggacgggccttgggatgtcattgtcattgggggcgggtattgtgggctgaccgcaacccgtgatttaaccgtcgcagggttcaagacgctgctgctggaggcccgtgatcgtattggtggccgctcctggagcagtaatattgacggttacccgtatgagatgggtggcacttgggttcattggcatcaatctcacgtgtggcgtgaaatcacgcgttataaaatgcacaacgcgctgtctccatcatttaacttttcacgtggcgtgaatcacttccaactgcgtaccaatccgaccaccagtacgtacatgacgcacgaagcggaggatgaactgctgcgtagcgcattgcataaattcaccaatgtcgacggcactaatggccgtacagtgttgccgttcccacatgatatgttttatgtgccggaatttcgcaagtatgacgaaatgtcatattccgaacgcattgaccagatccgcgacgaactgtctttgaacgaacgctctagtttagaggctttcattttattatgtagcggtggcaccctggaaaactccagctttggtgaatttctgcattggtgggcaatgtcgggttacacgtatcagggctgtatggattgtttaatctcctataaatttaaggatggccagagtgcgttcgcgcgtcgcttctgggaagaagccgctggcactggccgtctgggctatgtctttggttgtccggtgcgttctgtggtgaacgaacgcgacgcagtacgtgttaccgcacgtgacggtcgcgaattcgcagcgaaacgtttggtttgcacgattccgctgaacgtattgagttctgttcattttagcccaccactgtccccgcaacgcatggccgctgcgaacattggccatgttaaccagtgcgtcaaagtgcatgcggaagtcagtaatccggatatgcgttcatggtcgggtatctcctatccgttcaacaaattagcctacgctatcggcgatggcacgaccccagcgggtaatacgcatattgtgtgccttgggggggcccataatcatatccagccggaagaggacgtggaagcaacgaagatggccgttgaaaacatgtcgcctgggaatatggatatcaaacgtctggtcttccacaactggtgcaaggatgaatttgccaaaggcgcgtggttcttcgcccctccacagctgctgtcaaagagcctggatgaactgcgctgccgtcacggtaatgtcctgtttgcaaactccgattgggccttaggttggcgtggttttatcgatggtgctatcgaggagggcacccgcgcagcggttactgtaattgaggaactgcgtcctgcgcctgcggtgcgttcccacctg

SEQ ID NO: 66 - protein, 495 aa, synthetic construct
  REGION 1..495: note = Variant of monoamine oxidase
MTSRDGYQWTPETGLTQGVPSLGVISPPTNIEDTDKDGPWDVIVIGGGYCGLTATRDLTVAGFKTLLLEARDRIGGRSWSSNIDGYPYEMGGTWVHWHQSHVWREITRYKMHNALSPSFNFSRGVNHFQLRTNPTTSTYMTHEAEDELLRSALHKFTNVDGTNGRTVLPFPHDMFYVPEFRKYDEMSYSERIDQIRDELSLNERSSLEAFILLCSGGTLENSSFGEFLHWWAMSGYTYQGCMDCLISYKFKDGQSAFARRFWEEAAGTGRLGYVFGCPVRSVVNERDAVRVTARDGREFAAKRLVCTIPLNVLSSVHFSPPLSPQRMAAANIGHVNQCVKVHAEVSNPDMRSWSGISYPFNKLAYAIGDGTTPAGNTHIVCLGGAHNHIQPEEDVEATKMAVENMSPGNMDIKRLVFHNWCKDEFAKGAWFFAPPQLLSKSLDELRCRHGNVLFANSDWALGWRGFIDGAIEEGTRAAVTVIEELRPAPAVRSHL

SEQ ID NO: 67 - DNA, 1485 bp, synthetic construct
  misc_feature 1..1485: note = Variant of monoamine oxidase
  source 1..1485: mol_type = other DNA
atgaccagccgcgacggctatcagtggaccccggaaacgggtctgacccagggcgtaccgtccctgggtgtcatttcgccgccgactaacatcgaagataccgataaggacgggccttgggatgtcattgtcattgggggcgggtattgtgggctgaccgcaacccgtgatttaaccgtcgcagggttcaagacgctgctgctggaggcccgtgatcgtattggtggccgctcctggagcagtaatattgacggttacccgtatgagatgggtggcgggtgggttcattggcatcaatctcacgtgtggcgtgaaatcacgcgttataaaatgcacaacgcgctgtctccatcatttaacttttcacgtggcgtgaatcacttccaactgcgtaccaatccgaccaccagtacgtacatgacgcacgaagcggaggatgaactgctgcgtagcgcattgcataaattcaccaatgtcgacggcactaatggccgtacagtgttgccgttcccacatgatatgttttatgtgccggaatttcgcaagtatgacgaaatgtcatattccgaacgcattgaccagatccgcgacgaactgtctttgaacgaacgctctagtttagaggctttcattttattatgtagcggtggcaccctggaaaactccagctttggtgaatttctgcattggtgggcaatgtcgggttacacgtatcagggctgtatggattgtttaatctcctataaatttaaggatggccagagtgcgttcgcgcgtcgcttctgggaagaagccgctggcactggccgtctgggctatgtctttggttgtccggtgcgttctgtggtgaacgaacgcgacgcagtacgtgttaccgcacgtgacggtcgcgaattcgcagcgaaacgtttggtttgcacgattccgctgaacgtattgagttctgttcattttagcccaccactgtccccgcaacgcatggccgctgcgaacattggccatgttaaccagtgcgtcaaagtgcatgcggaagtcagttgtccggatatgcgttcatggtcgggtatctcctatccgttcaacaaattagcctacgctatcggcgatggcacgaccccagcgggtaatacgcatattgtgtgccttgggggggcccataatcatatccagccggaagaggacgtggaagcaacgaagatggccgttgaaaacatgtcgcctgggaatatggatatcaaacgtctggtcttccacaactggtgcaaggatgaatttgccaaaggcgcgtggttcttcgcccctccacagctgctgtcaaagagcctggatgaactgcgctgccgtcacggtaatgtcctgtttgcaaactccgattgggccttaggttggcgtggttttatcgatggtgctatcgaggagggcacccgcgcagcggttactgtaattgaggaactgcgtcctgcgcctgcggtgcgttcccacctg

SEQ ID NO: 68 - protein, 495 aa, synthetic construct
  REGION 1..495: note = Variant of monoamine oxidase
MTSRDGYQWTPETGLTQGVPSLGVISPPTNIEDTDKDGPWDVIVIGGGYCGLTATRDLTVAGFKTLLLEARDRIGGRSWSSNIDGYPYEMGGGWVHWHQSHVWREITRYKMHNALSPSFNFSRGVNHFQLRTNPTTSTYMTHEAEDELLRSALHKFTNVDGTNGRTVLPFPHDMFYVPEFRKYDEMSYSERIDQIRDELSLNERSSLEAFILLCSGGTLENSSFGEFLHWWAMSGYTYQGCMDCLISYKFKDGQSAFARRFWEEAAGTGRLGYVFGCPVRSVVNERDAVRVTARDGREFAAKRLVCTIPLNVLSSVHFSPPLSPQRMAAANIGHVNQCVKVHAEVSCPDMRSWSGISYPFNKLAYAIGDGTTPAGNTHIVCLGGAHNHIQPEEDVEATKMAVENMSPGNMDIKRLVFHNWCKDEFAKGAWFFAPPQLLSKSLDELRCRHGNVLFANSDWALGWRGFIDGAIEEGTRAAVTVIEELRPAPAVRSHL

SEQ ID NO: 69 - DNA, 1485 bp, synthetic construct
  misc_feature 1..1485: note = Variant of monoamine oxidase
  source 1..1485: mol_type = other DNA
atgaccagccgcgacggctatcagtggaccccggaaacgggtctgacccagggcgtaccgtccctgggtgtcatttcgccgccgactaacatcgaagataccgataaggacgggccttgggatgtcattgtcattgggggcgggtattgtgggctgaccgcaacccgtgatttaaccgtcgcagggttcaagacgctgctgctggaggcccgtgatcgtattggtggccgctcctggagcagtaatattgacggttacccgtatgagatgggtggcacttgggttcattggcatcaatctcacgtgtggcgtgaaatcacgcgttataaaatgcacaacgcgctgtctccatcatttaacttttcacgtggcgtgaatcacttccaactgcgtaccaatccgaccaccagtacgtacatgacgcacgaagcggaggatgaactgctgcgtagcgcattgcataaattcaccaatgtcgacggcactaatggccgtacagtgttgccgttcccacatgatatgttttatgtgccggaatttcgcaagtatgacgaaatgtcatattccgaacgcattgaccagatccgcgacgaactgtctttgaacgaacgctctagtttagaggctttcattttattatgtagcggtggcaccctggaaaactccagctttggtgaatttctgcattggtgggcaatgtcgggttacacgtatcagggctgtatggattgtttaatctcctataaatttaaggatggccagagtgcgttcgcgcgtcgcttctgggaagaagccgctggcactggccgtctgggctatgtctttggttgtccggtgcgttctgtggtgaacgaacgcgacgcagtacgtgttaccgcacgtgacggtcgcgaattcgcagcgaaacgtttggtttgcacgattccgctgaacgtattgagttctgttcattttagcccaccactgtccccgcaacgcatggccgctgcgaacattggccatgttaaccagggggtcaaagtgcatgcggaagtcagttgtccggatatgcgttcatggtcgggtatctcctatccgttcaacaaattagcctacgctatcggcgatggcacgaccccagcgggtaatacgcatattgtgtgccttgggggggcccataatcatatccagccggaagaggacgtggaagcaacgaagatggccgttgaaaacatgtcgcctgggaatatggatatcaaacgtctggtcttccacaactggtgcaaggatgaatttgccaaaggcgcgtggttcttcgcccctccacagctgctgtcaaagagcctggatgaactgcgctgccgtcacggtaatgtcctgtttgcaaactccgattgggccttaggttggcgtggttttatcgatggtgctatcgaggagggcacccgcgcagcggttactgtaattgaggaactgcgtcctgcgcctgcggtgcgttcccacctg

SEQ ID NO: 70 - protein, 495 aa, synthetic construct
  REGION 1..495: note = Variant of monoamine oxidase
MTSRDGYQWTPETGLTQGVPSLGVISPPTNIEDTDKDGPWDVIVIGGGYCGLTATRDLTVAGFKTLLLEARDRIGGRSWSSNIDGYPYEMGGTWVHWHQSHVWREITRYKMHNALSPSFNFSRGVNHFQLRTNPTTSTYMTHEAEDELLRSALHKFTNVDGTNGRTVLPFPHDMFYVPEFRKYDEMSYSERIDQIRDELSLNERSSLEAFILLCSGGTLENSSFGEFLHWWAMSGYTYQGCMDCLISYKFKDGQSAFARRFWEEAAGTGRLGYVFGCPVRSVVNERDAVRVTARDGREFAAKRLVCTIPLNVLSSVHFSPPLSPQRMAAANIGHVNQGVKVHAEVSCPDMRSWSGISYPFNKLAYAIGDGTTPAGNTHIVCLGGAHNHIQPEEDVEATKMAVENMSPGNMDIKRLVFHNWCKDEFAKGAWFFAPPQLLSKSLDELRCRHGNVLFANSDWALGWRGFIDGAIEEGTRAAVTVIEELRPAPAVRSHL

SEQ ID NO: 71 - DNA, 1485 bp, synthetic construct
  misc_feature 1..1485: note = Variant of monoamine oxidase
  source 1..1485: mol_type = other DNA
atgaccagccgcgacggctatcagtggaccccggaaacgggtctgacccagggcgtaccgtccctgggtgtcatttcgccgccgactaacatcgaagataccgataaggacgggccttgggatgtcattgtcattgggggcgggtattgtgggctgaccgcaacccgtgatttaaccgtcgcagggttcaagacgctgctgctggaggcccgtgatcgtattggtggccgctcctggagcagtaatattgacggttacccgtatgagatgggtggcacttgggttcattggcatcaatctcacgtgtggcgtgaaatcacgcgttataaaatgcacaacgcgctgtctccatcatttaacttttcacgtggcgtgaatcacttccaactgcgtaccaatccgaccaccagtacgtacatgacgcacgaagcggaggatgaactgctgcgtagcgcattgcataaattcaccaatgtcgacggcactaatggccgtacagtgttgccgttcccacatgatatgttttatgtgccggaatttcgcaagtatgacgaaatgtcatattccgaacgcattgaccagatccgcgacgaactgtctttgaacgaacgctctagtttagaggctttcattttattatgtagcggtggcaccctggaaaactccagctttggtgaatttctgcattggtgggcaatgtcgggttacacgtatcagggctgtatggattgtttaatctcctataaatttaaggatggccagagtgcgttcgcgcgtcgcttctgggaagaagccgctggcactggccgtctgggctatgtctttggttgtccggtgcgttctgtggtgaacgaacgcgacgcagtacgtgttaccgcacgtgacggtcgcgaattcgcagcgaaacgtttggtttgcacgattccgctgaacgtattgagttctgttcattttagcccaccactgtccccgcaacgcatggccgctgcgaacattggccatgttaaccagtgcgtcaaagtgcatgcggaagtcagttgtccggatatgcgttcatggtcgggtatctcctatccgttcaacaaattagcctacgctatcggcgatggcacgaccccagcgggtaatacgcatattgtgtgccttgggggggcccataatcatatccagccggaagaggacgtggaagcaacgaagatggccgttgaaaacatgtcgcctgggaatatggatatcaaacgtctggtcttcggtaactggtgcaaggatgaatttgccaaaggcgcgtggttcttcgcccctccacagctgctgtcaaagagcctggatgaactgcgctgccgtcacggtaatgtcctgtttgcaaactccgattgggccttaggttggcgtggttttatcgatggtgctatcgaggagggcacccgcgcagcggttactgtaattgaggaactgcgtcctgcgcctgcggtgcgttcccacctg

SEQ ID NO: 72 - protein, 495 aa, synthetic construct
  REGION 1..495: note = Variant of monoamine oxidase
MTSRDGYQWTPETGLTQGVPSLGVISPPTNIEDTDKDGPWDVIVIGGGYCGLTATRDLTVAGFKTLLLEARDRIGGRSWSSNIDGYPYEMGGTWVHWHQSHVWREITRYKMHNALSPSFNFSRGVNHFQLRTNPTTSTYMTHEAEDELLRSALHKFTNVDGTNGRTVLPFPHDMFYVPEFRKYDEMSYSERIDQIRDELSLNERSSLEAFILLCSGGTLENSSFGEFLHWWAMSGYTYQGCMDCLISYKFKDGQSAFARRFWEEAAGTGRLGYVFGCPVRSVVNERDAVRVTARDGREFAAKRLVCTIPLNVLSSVHFSPPLSPQRMAAANIGHVNQCVKVHAEVSCPDMRSWSGISYPFNKLAYAIGDGTTPAGNTHIVCLGGAHNHIQPEEDVEATKMAVENMSPGNMDIKRLVFGNWCKDEFAKGAWFFAPPQLLSKSLDELRCRHGNVLFANSDWALGWRGFIDGAIEEGTRAAVTVIEELRPAPAVRSHL

SEQ ID NO: 73 - DNA, 1485 bp, synthetic construct
  misc_feature 1..1485: note = Variant of monoamine oxidase
  source 1..1485: mol_type = other DNA
atgaccagccgcgacggctatcagtggaccccggaaacgggtctgacccagggcgtaccgtccctgggtgtcatttcgccgccgactaacatcgaagataccgataaggacgggccttgggatgtcattgtcattgggggcgggtattgtgggctgaccgcaacccgtgatttaaccgtcgcagggttcaagacgctgctgctggaggcccgtgatcgtattggtggccgctcctggagcagtaatattgacggttacccgtatgagatgggtggcacttgggttcattggcatcaatctcacgtgtggcgtgaaatcacgcgttataaaatgcacaacgcgctgtctccatcatttaacttttcacgtggcgtgaatcacttccaactgcgtaccaatccgaccaccagtacgtacatgacgcacgaagcggaggatgaactgctgcgtagcgcattgcataaattcaccaatgtcgacggcactaatggccgtacagtgttgccgttcccacatgatatgttttatgtgccggaatttcgcaagtatgacgaaatgccatattccgaacgcattgaccagatccgcgacgaactgtctttgaacgaacgctctagtttagaggctttcattttattatgtagcggtggcaccctggaaaactccagctttggtgaatttctgcattggtgggcaatgtcgggttacacgtatcagggctgtattgattgtttaatctcctataaatttaaggatggccagagtgcgttcgcgcgtcgcttctgggaagaagccgctggcactggccgtctgggctatgtctttggttgtccggtgcgttctgtggtgaacgaacgcgacgcagtacgtgttaccgcacgtgacggtcgcgaattcgcagcgaaacgtttggtttgcacgattccgctgaacgtattgagttctgttcattttagcccaccactgtccccgcaacgcatggccgctgcgaacattggccatgttaaccagtgcgtcaaagtgcatgcggaagtcagttgtccggatatgcgttcatggtcgggtatctcctatccgttcaacaaattagcctacgctatcggcgatggcacgaccccagcgggtaatacgcatattgtgtgccttgggggggcccataatcatatccagccggaagaggacgtggaagcaacgaagatggccgttgaaaacatgtcgcctgggaatatggatatcaaacgtctggtcttccacaactggtgcaaggatgaatttgccaaaggcgcgtggttcttcgcccctccacagctgctgtcaaagagcctggatgaactgcgctgccgtcacggtaatgtcctgtttgcaaactccgattgggccttaggttggcgtggttttatcgatggtgctatcgaggagggcacccgcgcagcggttactgtaattgaggaactgcgtcctgcgcctgcggtgcgttcccacctg

SEQ ID NO: 74 - protein, 495 aa, synthetic construct
  REGION 1..495: note = Variant of monoamine oxidase
MTSRDGYQWTPETGLTQGVPSLGVISPPTNIEDTDKDGPWDVIVIGGGYCGLTATRDLTVAGFKTLLLEARDRIGGRSWSSNIDGYPYEMGGTWVHWHQSHVWREITRYKMHNALSPSFNFSRGVNHFQLRTNPTTSTYMTHEAEDELLRSALHKFTNVDGTNGRTVLPFPHDMFYVPEFRKYDEMPYSERIDQIRDELSLNERSSLEAFILLCSGGTLENSSFGEFLHWWAMSGYTYQGCIDCLISYKFKDGQSAFARRFWEEAAGTGRLGYVFGCPVRSVVNERDAVRVTARDGREFAAKRLVCTIPLNVLSSVHFSPPLSPQRMAAANIGHVNQCVKVHAEVSCPDMRSWSGISYPFNKLAYAIGDGTTPAGNTHIVCLGGAHNHIQPEEDVEATKMAVENMSPGNMDIKRLVFHNWCKDEFAKGAWFFAPPQLLSKSLDELRCRHGNVLFANSDWALGWRGFIDGAIEEGTRAAVTVIEELRPAPAVRSHL

SEQ ID NO: 75 - DNA, 1485 bp, synthetic construct
  misc_feature 1..1485: note = Variant of monoamine oxidase
  source 1..1485: mol_type = other DNA
atgaccagccgcgacggctatcagtggaccccggaaacgggtctgacccagggcgtaccgtccctgggtgtcatttcgccgccgactaacatcgaagataccgataaggacgggccttgggatgtcattgtcattgggggcgggtattgtgggctgaccgcaacccgtgatttaaccgtcgcagggttcaagacgctgctgctggaggcccgtgatcgtattggtggccgctcctggagcagtaatattgacggttacccgtatgagatgggtggcacttgggttcattggcatcaatctcacgtgtggcgtgaaatcacgcgttataaaatgcacaacgcgctgtctccatcatttaacttttcacgtggcgtgaatcacttccaactgcgtaccaatccgaccaccagtacgtacatgacgcacgaagcggaggatgaactgctgcgtagcgcattgcataaattcaccaatgtcgacggcactaatggccgtacagtgttgccgttcccacatgatatgttttatgtgccggaatttcgcaagtatgacgaaatgtcatattccgaacgcattgaccagatccgcgacgaactgtctttgaacgaacgctctagtttagaggctttcattttattatgtagcggtggcaccctggaaaactccagctttggtgaatttctgcattggtgggcaatgtcgggttacacgtatcagggctgtatggattgtttaatctcctataaatttaaggatggccagagtgcgttcgcgcgtcgcttctgggaagaagccgctggcactggccgtctgggctatgtctttggttgtccggtgcgttctgtggtgaacgaacgcgacgcagtacgtgttaccgcacgtgacggtcgcgaattcgcagcgaaacgtttggtttgcacgattccgtcgaacgtattgagttctgttcattttagcccaccactgtccccgcaacgcatggccgctgcgaacattggccatgttaaccagtgcgtcaaagtgcatgcggaagtcagttgtccggatatgcgttcatggtcgggtatctcctatccgttcaacaaattagcctacgctatcggcgatggcacgaccccagcgggtaatacgcatattgtgtgccttgggggggcccataatcatatccagccggaagaggacgtggaagcaacgaagatggccgttgaaaacatgtcgcctgggaatatggatatcaaacgtctggtcttccacaactggtgcaaggatgaatttgccaaaggcgcgtggttcttcgcccctccacagctgctgtcaaagagcctggatgaactgcgctgccgtcacggtaatgtcctgtttgcaaactccgattgggccttaggttggcgtggttttatcgatggtgctatcgaggagggcacccgcgcagcggttactgtaattgaggaactgcgtcctgcgcctgcggtgcgttcccacctg

SEQ ID NO: 76 - protein, 495 aa, synthetic construct
  REGION 1..495: note = Variant of monoamine oxidase
MTSRDGYQWTPETGLTQGVPSLGVISPPTNIEDTDKDGPWDVIVIGGGYCGLTATRDLTVAGFKTLLLEARDRIGGRSWSSNIDGYPYEMGGTWVHWHQSHVWREITRYKMHNALSPSFNFSRGVNHFQLRTNPTTSTYMTHEAEDELLRSALHKFTNVDGTNGRTVLPFPHDMFYVPEFRKYDEMSYSERIDQIRDELSLNERSSLEAFILLCSGGTLENSSFGEFLHWWAMSGYTYQGCMDCLISYKFKDGQSAFARRFWEEAAGTGRLGYVFGCPVRSVVNERDAVRVTARDGREFAAKRLVCTIPSNVLSSVHFSPPLSPQRMAAANIGHVNQCVKVHAEVSCPDMRSWSGISYPFNKLAYAIGDGTTPAGNTHIVCLGGAHNHIQPEEDVEATKMAVENMSPGNMDIKRLVFHNWCKDEFAKGAWFFAPPQLLSKSLDELRCRHGNVLFANSDWALGWRGFIDGAIEEGTRAAVTVIEELRPAPAVRSHL

SEQ ID NO: 77 - DNA, 1485 bp, synthetic construct
  misc_feature 1..1485: note = Variant of monoamine oxidase
  source 1..1485: mol_type = other DNA
atgaccagccgcgacggctatcagtggaccccggaaacgggtctgacccagggcgtaccgtccctgggtgtcatttcgccgccgactaacatcgaagataccgataaggacgggccttgggatgtcattgtcattgggggggggtattgtgggctgaccgcaacccgtgatttaaccgtcgcagggttcaagacgctgctgctggaggcccgtgatcgtattggtggccgctcctggagcagtaatattgacggttacccgtatgagatgggtggcacttgggttcattggcatcaatctcacgtgtggcgtgaaatcacgcgttataaaatgcacaacgcgctgtctccatcatttaacttttcacgtggcgtgaatcacttccaactgcgtaccaatccgaccaccagtacgtacatgacgcacgaagcggaggatgaactgctgcgtagcgcattgcataaattcaccaatgtcgacggcactaatggccgtacagtgttgccgttcccacatgatatgttttatgtgccggaatttcgcaagtatgacgaaatgtcatattccgaacgcattgaccagatccgcgacgaactgagcctgaacgaacgctctagtttagaggctttcattttattatgtagcggtggcaccctggaaaactccagctttggtgaatttctgcattggtgggcaatgtcgggttacacgtatcagggctgtatggattgtttaatctcctataaatttaaggatggccagagtgcgttcgcgcgtcgcttctttgaagaagccctgggcactggccgtctgggctatgtctttggttgtccggtgcgttctgtggtgaacgaacgcgacgcagtacgtgttaccgcacgtgacggtcgcgaattcgcagcgaaacgtttggtttgcacgattccgctgaacgtattgagttctgttcattttagcccaccactgtccccgcaacgcatggccgctgcgaacattggccatgttaaccagtgcgtcaaagtgcatgcggaagtcagttgtccggatatgcgttcatggtcgggtatctcctatccgttcaacaaattagcctacgctatcggcgatggcacgaccccagcgggtaatacgcatattgtgtgccttgggggggcccataatcatatccagccggaagaggacgtggaagcaacgaagatggccgttgaaaacatgtcgcctgggaatatggatatcaaacgtctggtcttccacaactggagcaaggatgaatttgccaaaggcgcgtggttcttcgcccctccacagctgctgtcaaagagcctggatgaactgcgctgccgtcacggtaatgtcctgtttgcaaactccgattgggccttaggttggcgtggttttatcgatggtgctatcgaggagggcacccgcgcagcggttactgtaattgaggaactgcgtcctgcgcctgcggtgcgttcccacctg

SEQ ID NO: 78 - protein, 495 aa, synthetic construct
  REGION 1..495: note = Variant of monoamine oxidase
MTSRDGYQWTPETGLTQGVPSLGVISPPTNIEDTDKDGPWDVIVIGGGYCGLTATRDLTVAGFKTLLLEARDRIGGRSWSSNIDGYPYEMGGTWVHWHQSHVWREITRYKMHNALSPSFNFSRGVNHFQLRTNPTTSTYMTHEAEDELLRSALHKFTNVDGTNGRTVLPFPHDMFYVPEFRKYDEMSYSERIDQIRDELSLNERSSLEAFILLCSGGTLENSSFGEFLHWWAMSGYTYQGCMDCLISYKFKDGQSAFARRFFEEALGTGRLGYVFGCPVRSVVNERDAVRVTARDGREFAAKRLVCTIPLNVLSSVHFSPPLSPQRMAAANIGHVNQCVKVHAEVSCPDMRSWSGISYPFNKLAYAIGDGTTPAGNTHIVCLGGAHNHIQPEEDVEATKMAVENMSPGNMDIKRLVFHNWSKDEFAKGAWFFAPPQLLSKSLDELRCRHGNVLFANSDWALGWRGFIDGAIEEGTRAAVTVIEELRPAPAVRSHL

SEQ ID NO: 79 - DNA, 1485 bp, synthetic construct
  misc_feature 1..1485: note = Variant of monoamine oxidase
  source 1..1485: mol_type = other DNA
atgaccagccgcgacggctatcagtggaccccggaaacgggtctgacccagggcgtaccgtccctgggtgtcatttcgccgccgactaacatcgaagataccgataaggacgggccttgggatgtcattgtcattgggggcgggtattgtgggctgaccgcaacccgtgatttaaccgtcgcagggttcaagacgctgctgctggaggcccgtgatcgtattggtggccgctcctggagcagtaatattgacggttacccgtatgagatgggtggcacttgggttcattggcatcaatctcacgtgtggcgtgaaatcacgcgttataaaatgcacaacgcgctgtctccatcatttaacttttcacgtggcgtgaatcacttccaactgcgtaccaatccgaccaccagtacgtacatgacgcacgaagcggaggatgaactgctgcgtagcgcattgcataaattcaccaatgtcgacggcactaatggccgtacagtgttgccgttcccacatgatatgttttatgtgccggaatttcgcaagtatgacgaaatgtcatattccgaacgcattgaccagatccgcgacgaactgtctttgaacgaacgctctagtttagaggctttcattttattatgtagcggtggcaccctggaaaactccagctttggtgaatttctgcattggtgggcaatgtcgggttacacgtatcagggctgtatggattgtttaatctcctataaatttaaggatggccagagtgcgttcgcgcgtcgcttctgggaagaagccgctggcactggccgtctgggctatgtctttggttgtccggtgcgttctgtggtgaacgaacgcgacgcagtacgtgttaccgcacgtgacggtcgcgaattcgcagcgaaacgtttggtttgcacgattccgctgaacgtattgagttctgttcattttagcccaccactgtccccgcaacgcatggccgctgcgaacattggccatgttaaccagagtgtcaaagtgcatgcggaagtcagttgtccggatatgcgttcatggtcgggtatctcctatccgttcaacaaattagcctacgctatcggcgatggcacgaccccagcgggtaatacgcatattgtgtgccttgggggggcccataatcatatccagccggaagaggacgtggaagcaacgaagatggccgttgaaaacatgtcgcctgggaatatggatatcaaacgtctggtcttccacaactggtgcaaggatgaatttgccaaaggcgcgtggttcttcgcccctccacagctgctgtcaaagagcctggatgaactgcgctgccgtcacggtaatgtcctgtttgcaaactccgattgggccttaggttggcgtggttttatcgatggtgctatcgaggagggcacccgcgcagcggttactgtaattgaggaactgcgtcctgcgcctgcggtgcgttcccacctg

SEQ ID NO: 80 - protein, 495 aa, synthetic construct
  REGION 1..495: note = Variant of monoamine oxidase
MTSRDGYQWTPETGLTQGVPSLGVISPPTNIEDTDKDGPWDVIVIGGGYCGLTATRDLTVAGFKTLLLEARDRIGGRSWSSNIDGYPYEMGGTWVHWHQSHVWREITRYKMHNALSPSFNFSRGVNHFQLRTNPTTSTYMTHEAEDELLRSALHKFTNVDGTNGRTVLPFPHDMFYVPEFRKYDEMSYSERIDQIRDELSLNERSSLEAFILLCSGGTLENSSFGEFLHWWAMSGYTYQGCMDCLISYKFKDGQSAFARRFWEEAAGTGRLGYVFGCPVRSVVNERDAVRVTARDGREFAAKRLVCTIPLNVLSSVHFSPPLSPQRMAAANIGHVNQSVKVHAEVSCPDMRSWSGISYPFNKLAYAIGDGTTPAGNTHIVCLGGAHNHIQPEEDVEATKMAVENMSPGNMDIKRLVFHNWCKDEFAKGAWFFAPPQLLSKSLDELRCRHGNVLFANSDWALGWRGFIDGAIEEGTRAAVTVIEELRPAPAVRSHL

SEQ ID NO: 81 - DNA, 1485 bp, synthetic construct
  misc_feature 1..1485: note = Variant of monoamine oxidase
  source 1..1485: mol_type = other DNA
atgaccagccgcgacggctatcagtggaccccggaaacgggtctgacccagggcgtaccgtccctgggtgtcatttcgccgccgactaacatcgaagataccgataaggacgggccttgggatgtcattgtcattgggggcgggtattgtgggctgaccgcaacccgtgatttaaccgtcgcagggttcaagacgctgctgctggaggcccgtgatcgtattggtggccgctcctggacgagtaatattgacggttacccgtatgagatgggtggcacttgggttcattggcatcaatctcacgtgtggcgtgaaatcacgcgttataaaatgcacaacgcgctgtctccatcatttaacttttcacgtggcgtgaatcacttccaactgcgtaccaatccgaccaccagtacgtacatgacgcacgaagcggaggatgaactgctgcgtagcgcattgcataaattcaccaatgtcgacggcactaatggccgtacagtgttgccgttcccacatgatatgttttatgtgccggaatttcgcaagtatgacgaaatgtcatattccgaacgcattgaccagatccgcgacgaactgtctttgaacgaacgctctagtttagaggctttcattttattatgtagcggtggcaccctggaaaactccagctttggtgaatttctgcattggtgggcaatgtcgggttacacgtatcagggctgtatggattgtttaatctcctataaatttaaggatggccagagtgcgttcgcgcgtcgcttctgggaagaagccgctggcactggccgtctgggctatgtctttggttgtccggtgcgttctgtggtgaacgaacgcgacgcagtacgtgttaccgcacgtgacggtcgcgaattcgcagcgaaacgtttggtttgcacgattccgctgaacgtattgagttctgttcattttagcccaccactgtccccgcaacgcatggccgctgcgaacattggccatgttaaccagtgcgtcaaagtgcatgcggaagtcagttgtccggatatgcgttcatggtcgggtatctcctatccgttcaacaaattagcctacgctatcggcgatggcacgaccccagcgggtaatacgcatattgtgtgccttgggggggcccataatcatatccagccggaagaggacgtggaagcaacgaagatggccgttgaaaacatgtcgcctgggaatatggatatcaaacgtctggtcttccacaactggtgcaaggatgaatttgccaaaggcgcgtggttcttcgcccctccacagctgctgtcaaagagcctggatgaactgcgctgccgtcacggtaatgtcctgtttgcaaactccgattgggccttaggttggcgtggttttatcgatggtgctatcgaggagggcacccgcgcagcggttactgtaattgaggaactgcgtcctgcgcctgcggtgcgttcccacctg

SEQ ID NO: 82 - protein, 495 aa, synthetic construct
  REGION 1..495: note = Variant of monoamine oxidase
MTSRDGYQWTPETGLTQGVPSLGVISPPTNIEDTDKDGPWDVIVIGGGYCGLTATRDLTVAGFKTLLLEARDRIGGRSWTSNIDGYPYEMGGTWVHWHQSHVWREITRYKMHNALSPSFNFSRGVNHFQLRTNPTTSTYMTHEAEDELLRSALHKFTNVDGTNGRTVLPFPHDMFYVPEFRKYDEMSYSERIDQIRDELSLNERSSLEAFILLCSGGTLENSSFGEFLHWWAMSGYTYQGCMDCLISYKFKDGQSAFARRFWEEAAGTGRLGYVFGCPVRSVVNERDAVRVTARDGREFAAKRLVCTIPLNVLSSVHFSPPLSPQRMAAANIGHVNQCVKVHAEVSCPDMRSWSGISYPFNKLAYAIGDGTTPAGNTHIVCLGGAHNHIQPEEDVEATKMAVENMSPGNMDIKRLVFHNWCKDEFAKGAWFFAPPQLLSKSLDELRCRHGNVLFANSDWALGWRGFIDGAIEEGTRAAVTVIEELRPAPAVRSHL

SEQ ID NO: 83 - DNA, 1485 bp, synthetic construct
  misc_feature 1..1485: note = Variant of monoamine oxidase
  source 1..1485: mol_type = other DNA
atgaccagccgcgacggctatcagtggaccccggaaacgggtctgacccagggcgtaccgtccctgggtgtcatttcgccgccgactaacatcgaagataccgataaggacgggccttgggatgtcattgtcattgggggcgggtattgtgggctgaccgcaacccgtgatttaaccgtcgcagggttcaagacgctgctgctggaggcccgtgatcgtattggtggccgctcctggagcagtaatattgacggttacccgtatgagatgggtggcacttgggttcattggcatcaatctcacgtgtggcgtgaaatcacgcgttataaaatgcacaacgcgctgtctccatcatttaacttttcacgtggcgtgaatcacttccaactgcgtaccaatccgaccaccagtacgtacatgacgcacgaagcggaggatgaactgctgcgtagcgcattgcataaattcaccaatgtcgacggcactaatggccgtacagtgttgccgttcccacatgatatgttttatgtgccggaatttcgcaagtatgacgaaatgtcatattccgaacgcattgaccagatccgcgacgaactgtctttgaacgaacgctctagtttagaggctttcattttattatgtagcggtggcaccctggaaaactccagctttggtgaatttctgcattggtgggcaatgtcgggttacacgtatcagggctgtatggattgtttaatctcctataaatttaaggatggccagagtgcgttcgcgcgtcgcttctgggaagaagccgctggcactggccgtctgggctatgtctttggttgtccggtgcgttctgtggtgaacgaacgcgacgcagtacgtgttaccgcacgtgacggtcgcgaattcgcagcgaaacgtttggtttgcacgattccgctgaacgtattgagttctgttcattttagcccaccactgtccccgcaacgcatggccgctgcgaacattggccatgttaaccaggcggtcaaagtgcatgcggaagtcagttgtccggatatgcgttcatggtcgggtatctcctatccgttcaacaaattagcctacgctatcggcgatggcacgaccccagcgggtaatacgcatattgtgtgccttgggggggcccataatcatatccagccggaagaggacgtggaagcaacgaagatggccgttgaaaacatgtcgcctgggaatatggatatcaaacgtctggtcttccacaactggtgcaaggatgaatttgccaaaggcgcgtggttcttcgcccctccacagctgctgtcaaagagcctggatgaactgcgctgccgtcacggtaatgtcctgtttgcaaactccgattgggccttaggttggcgtggttttatcgatggtgctatcgaggagggcacccgcgcagcggttactgtaattgaggaactgcgtcctgcgcctgcggtgcgttcccacctg

SEQ ID NO: 84 - protein, 495 aa, synthetic construct
  REGION 1..495: note = Variant of monoamine oxidase
MTSRDGYQWTPETGLTQGVPSLGVISPPTNIEDTDKDGPWDVIVIGGGYCGLTATRDLTVAGFKTLLLEARDRIGGRSWSSNIDGYPYEMGGTWVHWHQSHVWREITRYKMHNALSPSFNFSRGVNHFQLRTNPTTSTYMTHEAEDELLRSALHKFTNVDGTNGRTVLPFPHDMFYVPEFRKYDEMSYSERIDQIRDELSLNERSSLEAFILLCSGGTLENSSFGEFLHWWAMSGYTYQGCMDCLISYKFKDGQSAFARRFWEEAAGTGRLGYVFGCPVRSVVNERDAVRVTARDGREFAAKRLVCTIPLNVLSSVHFSPPLSPQRMAAANIGHVNQAVKVHAEVSCPDMRSWSGISYPFNKLAYAIGDGTTPAGNTHIVCLGGAHNHIQPEEDVEATKMAVENMSPGNMDIKRLVFHNWCKDEFAKGAWFFAPPQLLSKSLDELRCRHGNVLFANSDWALGWRGFIDGAIEEGTRAAVTVIEELRPAPAVRSHL

SEQ ID NO: 85 - DNA, 1485 bp, synthetic construct
  misc_feature 1..1485: note = Variant of monoamine oxidase
  source 1..1485: mol_type = other DNA
atgaccagccgcgacggctatcagtggaccccggaaacgggtctgacccagggcgtaccgtccctgggtgtcatttcgccgccgactaacatcgaagataccgataaggacgggccttgggatgtcattgtcattgggggcgggtattgtgggctgaccgcaacccgtgatttaaccgtcgcagggttcaagacgctgctgctggaggcccgtgatcgtattggtggccgctcctggagcagtaatattgacggttacccgtatgagatgggtggcacttgggttcattggcatcaatctcacgtgtggcgtgaaatcacgcgttataaaatgcacaacgcgctgtctaagtcatttaacttttcacgtggcgtgaatcacttccaactgcgtaccaatccgaccaccagtacgtacatgacgcacgaagcggaggatgaactgctgcgtagcgcattgcataaattcaccaatgtcgacggcactaatggccgtacagtgttgccgttcccacatgatatgttttatgtgccggaatttcgcaagtatgacgaaatgtcatattccgaacgcattgaccagatccgcgacgaactgtctttgaacgaacgctctagtttagaggctttcattttattatgtagcggtggcaccctggaaaactccagctttggtgaatttctgcattggtgggcaatgtcgggttacacgtatcagggctgtatggattgtttaatctcctataaatttaaggatggccagagtgcgttcgcgcgtcgcttctgggaagaagccgctggcactggccgtctgggctatgtctttggttgtccggtgcgttctgtggtgaacgaacgcgacgcagtacgtgttaccgcacgtgacggtcgcgaattcgcagcgaaacgtttggtttgcacgattccgctgaacgtattgagttctgttcattttagcccaccactgtccccgcaacgcatggccgctgcgaacattggccatgttaaccagtgcgtcaaagtgcatgcggaagtcagttgtccggatatgcgttcatggtcgggtatctcctatccgttcaacaaattagcctacgctatcggcgatggcacgaccccagcgggtaatacgcatattgtgtgccttgggggggcccataatcatatccagccggaagaggacgtggaagcaacgaagatggccgttgaaaacatgtcgcctgggaatatggatatcaaacgtctggtcttccacaactggtgcaaggatgaatttgccaaaggcgcgtggttcttcgcccctccacagctgctgtcaaagagcctggatgaactgcgctgccgtcacggtaatgtcctgtttgcaaactccgattgggccttaggttggcgtggttttatcgatggtgctatcgaggagggcacccgcgcagcggttactgtaattgaggaactgcgtcctgcgcctgcggtgcgttcccacctg

SEQ ID NO: 86 - protein, 495 aa, synthetic construct
  REGION 1..495: note = Variant of monoamine oxidase
MTSRDGYQWTPETGLTQGVPSLGVISPPTNIEDTDKDGPWDVIVIGGGYCGLTATRDLTVAGFKTLLLEARDRIGGRSWSSNIDGYPYEMGGTWVHWHQSHVWREITRYKMHNALSKSFNFSRGVNHFQLRTNPTTSTYMTHEAEDELLRSALHKFTNVDGTNGRTVLPFPHDMFYVPEFRKYDEMSYSERIDQIRDELSLNERSSLEAFILLCSGGTLENSSFGEFLHWWAMSGYTYQGCMDCLISYKFKDGQSAFARRFWEEAAGTGRLGYVFGCPVRSVVNERDAVRVTARDGREFAAKRLVCTIPLNVLSSVHFSPPLSPQRMAAANIGHVNQCVKVHAEVSCPDMRSWSGISYPFNKLAYAIGDGTTPAGNTHIVCLGGAHNHIQPEEDVEATKMAVENMSPGNMDIKRLVFHNWCKDEFAKGAWFFAPPQLLSKSLDELRCRHGNVLFANSDWALGWRGFIDGAIEEGTRAAVTVIEELRPAPAVRSHL

SEQ ID NO: 87 - DNA, 1485 bp, synthetic construct
  misc_feature 1..1485: note = Variant of monoamine oxidase
  source 1..1485: mol_type = other DNA
atgaccagccgcgacggctatcagtggaccccggaaacgggtctgacccagggcgtaccgtccctgggtgtcatttcgccgccgactaacatcgaagataccgataaggacgggccttgggatgtcattgtcattgggggcgggtattgtgggctgaccgcaacccgtgatttaaccgtcgcagggttcaagacgctgctgctggaggcccgtgatcgtattggtggccgctcctggagcagtaatattgacggttacccgtatgagatgggtggcacttgggttcattggcatcaatctcacgtgtggcgtgaaatcacgcgttataaaatgcacaacgcgctgtctccatcatttaacttttcacgtggcgtgaatcacttccaactgcgtaccaatccgaccaccagtacgtacatgacgcacgaagcggaggatgaactgctgcgtagcgcattgcataaattcaccaatgtcgacggcactaatggccgtacagtgttgccgttcccacatgatatgttttatgtgccggaatttcgcaagtatgacgaaatgtcatattccgaacgcattgaccagatccgcgacgaactgtctttgaacgaacgctctagtttagaggctttcattttattatgtagcggtggcaccctggaaaactccagctttggtgaatttctgcattggtgggcaatgtcgggttacacgtatcagggctgtatggattgtttaatctcctataaatttaaggggggccagagtgcgttcgcgcgtcgcttctgggaagaagccgctggcactggccgtctgggctatgtctttggttgtccggtgcgttctgtggtgaacgaacgcgacgcagtacgtgttaccgcacgtgacggtcgcgaattcgcagcgaaacgtttggtttgcacgattccgctgaacgtattgagttctgttcattttagcccaccactgtccccgcaacgcatggccgctgcgaacattggccatgttaaccagtgcgtcaaagtgcatgcggaagtcagttgtccggatatgcgttcatggtcgggtatctcctatccgttcaacaaattagcctacgctatcggcgatggcacgaccccagcgggtaatacgcatattgtgtgccttgggggggcccataatcatatccagccggaagaggacgtggaagcaacgaagatggccgttgaaaacatgtcgcctgggaatatggatatcaaacgtctggtcttccacaactggtgcaaggatgaatttgccaaaggcgcgtggttcttcgcccctccacagctgctgtcaaagagcctggatgaactgcgctgccgtcacggtaatgtcctgtttgcaaactccgattgggccttaggttggcgtggttttatcgatggtgctatcgaggagggcacccgcgcagcggttactgtaattgaggaactgcgtcctgcgcctgcggtgcgttcccacctg

SEQ ID NO: 88 - protein, 495 aa, synthetic construct
  REGION 1..495: note = Variant of monoamine oxidase
MTSRDGYQWTPETGLTQGVPSLGVISPPTNIEDTDKDGPWDVIVIGGGYCGLTATRDLTVAGFKTLLLEARDRIGGRSWSSNIDGYPYEMGGTWVHWHQSHVWREITRYKMHNALSPSFNFSRGVNHFQLRTNPTTSTYMTHEAEDELLRSALHKFTNVDGTNGRTVLPFPHDMFYVPEFRKYDEMSYSERIDQIRDELSLNERSSLEAFILLCSGGTLENSSFGEFLHWWAMSGYTYQGCMDCLISYKFKGGQSAFARRFWEEAAGTGRLGYVFGCPVRSVVNERDAVRVTARDGREFAAKRLVCTIPLNVLSSVHFSPPLSPQRMAAANIGHVNQCVKVHAEVSCPDMRSWSGISYPFNKLAYAIGDGTTPAGNTHIVCLGGAHNHIQPEEDVEATKMAVENMSPGNMDIKRLVFHNWCKDEFAKGAWFFAPPQLLSKSLDELRCRHGNVLFANSDWALGWRGFIDGAIEEGTRAAVTVIEELRPAPAVRSHL

SEQ ID NO: 89 - DNA, 1485 bp, synthetic construct
  misc_feature 1..1485: note = Variant of monoamine oxidase
  source 1..1485: mol_type = other DNA
atgaccagccgcgacggctatcagtggaccccggaaacgggtctgacccagggcgtaccgtccctgggtgtcatttcgccgccgactaacatcgaagataccgataaggacgggccttgggatgtcattgtcattgggggcgggtattgtgggctgaccgcaacccgtgatttaaccgtcgcagggttcaagacgctgctgctggaggcccgtgatcgtattggtggccgctcctggagcagtaatattgacggttacccgtatgagatgggtggcacttgggttcattggcatcaatctcacgtgtggcgtgaaatcacgcgttataaaatgcacaacgcgctgtctccatcatttaacttttcacgtggcgtgaatcacttccaactgcgtaccaatccgaccaccagtacgtacatgacgcacgaagcgagtgatgaactgctgcgtagcgcattgcataaattcaccaatgtcgacggcactaatggccgtacagtgttgccgttcccacatgatatgttttatgtgccggaatttcgcaagtatgacgaaatgtcatattccgaacgcattgaccagatccgcgacgaactgtctttgaacgaacgctctagtttagaggctttcattttattatgtagcggtggcaccctggaaaactccagctttggtgaatttctgcattggtgggcaatgtcgggttacacgtatcagggctgtatggattgtttaatctcctataaatttaaggatggccagagtgcgttcgcgcgtcgcttctgggaagaagccgctggcactggccgtctgggctatgtctttggttgtccggtgcgttctgtggtgaacgaacgcgacgcagtacgtgttaccgcacgtgacggtcgcgaattcgcagcgaaacgtttggtttgcacgattccgctgaacgtattgagttctgttcattttagcccaccactgtccccgcaacgcatggccgctgcgaacattggccatgttaaccagtgcgtcaaagtgcatgcggaagtcagttgtccggatatgcgttcatggtcgggtatctcctatccgttcaacaaattagcctacgctatcggcgatggcacgaccccagcgggtaatacgcatattgtgtgccttgggggggcccataatcatatccagccggaagaggacgtggaagcaacgaagatggccgttgaaaacatgtcgcctgggaatatggatatcaaacgtctggtcttccacaactggtgcaaggatgaatttgccaaaggcgcgtggttcttcgcccctccacagctgctgtcaaagagcctggatgaactgcgctgccgtcacggtaatgtcctgtttgcaaactccgattgggccttaggttggcgtggttttatcgatggtgctatcgaggagggcacccgcgcagcggttactgtaattgaggaactgcgtcctgcgcctgcggtgcgttcccacctg

SEQ ID NO: 90 - protein, 495 aa, synthetic construct
  REGION 1..495: note = Variant of monoamine oxidase
MTSRDGYQWTPETGLTQGVPSLGVISPPTNIEDTDKDGPWDVIVIGGGYCGLTATRDLTVAGFKTLLLEARDRIGGRSWSSNIDGYPYEMGGTWVHWHQSHVWREITRYKMHNALSPSFNFSRGVNHFQLRTNPTTSTYMTHEASDELLRSALHKFTNVDGTNGRTVLPFPHDMFYVPEFRKYDEMSYSERIDQIRDELSLNERSSLEAFILLCSGGTLENSSFGEFLHWWAMSGYTYQGCMDCLISYKFKDGQSAFARRFWEEAAGTGRLGYVFGCPVRSVVNERDAVRVTARDGREFAAKRLVCTIPLNVLSSVHFSPPLSPQRMAAANIGHVNQCVKVHAEVSCPDMRSWSGISYPFNKLAYAIGDGTTPAGNTHIVCLGGAHNHIQPEEDVEATKMAVENMSPGNMDIKRLVFHNWCKDEFAKGAWFFAPPQLLSKSLDELRCRHGNVLFANSDWALGWRGFIDGAIEEGTRAAVTVIEELRPAPAVRSHL

SEQ ID NO: 91 - DNA, 1485 bp, synthetic construct
  misc_feature 1..1485: note = Variant of monoamine oxidase
  source 1..1485: mol_type = other DNA
atgaccagccgcgacggctatcagtggaccccggaaacgggtctgacccagggcgtaccgtccctgggtgtcatttcgccgccgactaacatcgaagataccgataaggacgggccttgggatgtcattgtcattgggggcgggtattgtgggctgaccgcaacccgtgatttaaccgtcgcagggttcaagacgctgctgctggaggcccgtgatcgtattggtggccgctcctggagcagtaatattgacggttacccgtatgagatgggtggcacttgggttcattggcatcaatctcacgtgtggcgtgaaatcacgcgttataaaatgcacggggcgctgtctccatcatttaacttttcacgtggcgtgaatcacttccaactgcgtaccaatccgaccaccagtacgtacatgacgcacgaagcggaggatgaactgctgcgtagcgcattgcataaattcaccaatgtcgacggcactaatggccgtacagtgttgccgttcccacatgatatgttttatgtgccggaatttcgcaagtatgacgaaatgtcatattccgaacgcattgaccagatccgcgacgaactgtctttgaacgaacgctctagtttagaggctttcattttattatgtagcggtggcaccctggaaaactccagctttggtgaatttctgcattggtgggcaatgtcgggttacacgtatcagggctgtatggattgtttaatctcctataaatttaaggatggccagagtgcgttcgcgcgtcgcttctgggaagaagccgctggcactggccgtctgggctatgtctttggttgtccggtgcgttctgtggtgaacgaacgcgacgcagtacgtgttaccgcacgtgacggtcgcgaattcgcagcgaaacgtttggtttgcacgattccgctgaacgtattgagttctgttcattttagcccaccactgtccccgcaacgcatggccgctgcgaacattggccatgttaaccagtgcgtcaaagtgcatgcggaagtcagttgtccggatatgcgttcatggtcgggtatctcctatccgttcaacaaattagcctacgctatcggcgatggcacgaccccagcgggtaatacgcatattgtgtgccttgggggggcccataatcatatccagccggaagaggacgtggaagcaacgaagatggccgttgaaaacatgtcgcctgggaatatggatatcaaacgtctggtcttccacaactggtgcaaggatgaatttgccaaaggcgcgtggttcttcgcccctccacagctgctgtcaaagagcctggatgaactgcgctgccgtcacggtaatgtcctgtttgcaaactccgattgggccttaggttggcgtggttttatcgatggtgctatcgaggagggcacccgcgcagcggttactgtaattgaggaactgcgtcctgcgcctgcggtgcgttcccacctg

SEQ ID NO: 92 - protein, 495 aa, synthetic construct
  REGION 1..495: note = Variant of monoamine oxidase
MTSRDGYQWTPETGLTQGVPSLGVISPPTNIEDTDKDGPWDVIVIGGGYCGLTATRDLTVAGFKTLLLEARDRIGGRSWSSNIDGYPYEMGGTWVHWHQSHVWREITRYKMHGALSPSFNFSRGVNHFQLRTNPTTSTYMTHEAEDELLRSALHKFTNVDGTNGRTVLPFPHDMFYVPEFRKYDEMSYSERIDQIRDELSLNERSSLEAFILLCSGGTLENSSFGEFLHWWAMSGYTYQGCMDCLISYKFKDGQSAFARRFWEEAAGTGRLGYVFGCPVRSVVNERDAVRVTARDGREFAAKRLVCTIPLNVLSSVHFSPPLSPQRMAAANIGHVNQCVKVHAEVSCPDMRSWSGISYPFNKLAYAIGDGTTPAGNTHIVCLGGAHNHIQPEEDVEATKMAVENMSPGNMDIKRLVFHNWCKDEFAKGAWFFAPPQLLSKSLDELRCRHGNVLFANSDWALGWRGFIDGAIEEGTRAAVTVIEELRPAPAVRSHL

SEQ ID NO: 93 - DNA, 1485 bp, synthetic construct
  misc_feature 1..1485: note = Variant of monoamine oxidase
  source 1..1485: mol_type = other DNA
atgaccagccgcgacggctatcagtggaccccggaaacgggtctgacccagggcgtaccgtccctgggtgtcatttcgccgccgactaacatcgaagataccgataaggacgggccttgggatgtcattgtcattgggggcgggtattgtgggctgaccgcaacccgtgatttaaccgtcgcagggttcaagacgctgctgctggaggcccgtgatcgtattggtggccgctcctggagcagtaatattgacggttacccgtatgagatgggtggcacttgggttcattggcatcaatctcacgtgtggcgtgaaatcacgcgttataaaatgcacaacgcgctgtctccatcatttaacttttcacgtggcgtgaatcacttccaactgcgtaccaatccgaccaccagtacgtacatgacgcacgaagcgggtgatgaactgctgcgtagcgcattgcataaattcaccaatgtcgacggcactaatggccgtacagtgttgccgttcccacatgatatgttttatgtgccggaatttcgcaagtatgacgaaatgtcatattccgaacgcattgaccagatccgcgacgaactgtctttgaacgaacgctctagtttagaggctttcattttattatgtagcggtggcaccctggaaaactccagctttggtgaatttctgcattggtgggcaatgtcgggttacacgtatcagggctgtatggattgtttaatctcctataaatttaaggatggccagagtgcgttcgcgcgtcgcttctgggaagaagccgctggcactggccgtctgggctatgtctttggttgtccggtgcgttctgtggtgaacgaacgcgacgcagtacgtgttaccgcacgtgacggtcgcgaattcgcagcgaaacgtttggtttgcacgattccgctgaacgtattgagttctgttcattttagcccaccactgtccccgcaacgcatggccgctgcgaacattggccatgttaaccagtgcgtcaaagtgcatgcggaagtcagttgtccggatatgcgttcatggtcgggtatctcctatccgttcaacaaattagcctacgctatcggcgatggcacgaccccagcgggtaatacgcatattgtgtgccttgggggggcccataatcatatccagccggaagaggacgtggaagcaacgaagatggccgttgaaaacatgtcgcctgggaatatggatatcaaacgtctggtcttccacaactggtgcaaggatgaatttgccaaaggcgcgtggttcttcgcccctccacagctgctgtcaaagagcctggatgaactgcgctgccgtcacggtaatgtcctgtttgcaaactccgattgggccttaggttggcgtggttttatcgatggtgctatcgaggagggcacccgcgcagcggttactgtaattgaggaactgcgtcctgcgcctgcggtgcgttcccacctg

SEQ ID NO: 94 - protein, 495 aa, synthetic construct
  REGION 1..495: note = Variant of monoamine oxidase
MTSRDGYQWTPETGLTQGVPSLGVISPPTNIEDTDKDGPWDVIVIGGGYCGLTATRDLTVAGFKTLLLEARDRIGGRSWSSNIDGYPYEMGGTWVHWHQSHVWREITRYKMHNALSPSFNFSRGVNHFQLRTNPTTSTYMTHEAGDELLRSALHKFTNVDGTNGRTVLPFPHDMFYVPEFRKYDEMSYSERIDQIRDELSLNERSSLEAFILLCSGGTLENSSFGEFLHWWAMSGYTYQGCMDCLISYKFKDGQSAFARRFWEEAAGTGRLGYVFGCPVRSVVNERDAVRVTARDGREFAAKRLVCTIPLNVLSSVHFSPPLSPQRMAAANIGHVNQCVKVHAEVSCPDMRSWSGISYPFNKLAYAIGDGTTPAGNTHIVCLGGAHNHIQPEEDVEATKMAVENMSPGNMDIKRLVFHNWCKDEFAKGAWFFAPPQLLSKSLDELRCRHGNVLFANSDWALGWRGFIDGAIEEGTRAAVTVIEELRPAPAVRSHL

SEQ ID NO: 95 - DNA, 1485 bp, synthetic construct
  misc_feature 1..1485: note = Variant of monoamine oxidase
  source 1..1485: mol_type = other DNA
atgaccagccgcgacggctatcagtggaccccggaaacgggtctgacccagggcgtaccgtccctgggtgtcatttcgccgccgactaacatcgaagataccgataaggacgggccttgggatgtcattgtcattgggggcgggtattgtgggctgaccgcaacccgtgatttaaccgtcgcagggttcaagacgctgctgctggaggcccgtgatcgtattggtggccgctcctggagcagtaatattgacggttacccgtatgagatgggtggcacttgggttcattggcatcaatctcacgtgtggcgtgaaatcacgcgttataaaatgcacaacgcgctgtctcgttcatttaacttttcacgtggcgtgaatcacttccaactgcgtaccaatccgaccaccagtacgtacatgacgcacgaagcggaggatgaactgctgcgtagcgcattgcataaattcaccaatgtcgacggcactaatggccgtacagtgttgccgttcccacatgatatgttttatgtgccggaatttcgcaagtatgacgaaatgtcatattccgaacgcattgaccagatccgcgacgaactgtctttgaacgaacgctctagtttagaggctttcattttattatgtagcggtggcaccctggaaaactccagctttggtgaatttctgcattggtgggcaatgtcgggttacacgtatcagggctgtatggattgtttaatctcctataaatttaaggatggccagagtgcgttcgcgcgtcgcttctgggaagaagccgctggcactggccgtctgggctatgtctttggttgtccggtgcgttctgtggtgaacgaacgcgacgcagtacgtgttaccgcacgtgacggtcgcgaattcgcagcgaaacgtttggtttgcacgattccgctgaacgtattgagttctgttcattttagcccaccactgtccccgcaacgcatggccgctgcgaacattggccatgttaaccagtgcgtcaaagtgcatgcggaagtcagttgtccggatatgcgttcatggtcgggtatctcctatccgttcaacaaattagcctacgctatcggcgatggcacgaccccagcgggtaatacgcatattgtgtgccttgggggggcccataatcatatccagccggaagaggacgtggaagcaacgaagatggccgttgaaaacatgtcgcctgggaatatggatatcaaacgtctggtcttccacaactggtgcaaggatgaatttgccaaaggcgcgtggttcttcgcccctccacagctgctgtcaaagagcctggatgaactgcgctgccgtcacggtaatgtcctgtttgcaaactccgattgggccttaggttggcgtggttttatcgatggtgctatcgaggagggcacccgcgcagcggttactgtaattgaggaactgcgtcctgcgcctgcggtgcgttcccacctg

SEQ ID NO: 96 - protein, 495 aa, synthetic construct
  REGION 1..495: note = Variant of monoamine oxidase
MTSRDGYQWTPETGLTQGVPSLGVISPPTNIEDTDKDGPWDVIVIGGGYCGLTATRDLTVAGFKTLLLEARDRIGGRSWSSNIDGYPYEMGGTWVHWHQSHVWREITRYKMHNALSRSFNFSRGVNHFQLRTNPTTSTYMTHEAEDELLRSALHKFTNVDGTNGRTVLPFPHDMFYVPEFRKYDEMSYSERIDQIRDELSLNERSSLEAFILLCSGGTLENSSFGEFLHWWAMSGYTYQGCMDCLISYKFKDGQSAFARRFWEEAAGTGRLGYVFGCPVRSVVNERDAVRVTARDGREFAAKRLVCTIPLNVLSSVHFSPPLSPQRMAAANIGHVNQCVKVHAEVSCPDMRSWSGISYPFNKLAYAIGDGTTPAGNTHIVCLGGAHNHIQPEEDVEATKMAVENMSPGNMDIKRLVFHNWCKDEFAKGAWFFAPPQLLSKSLDELRCRHGNVLFANSDWALGWRGFIDGAIEEGTRAAVTVIEELRPAPAVRSHL

SEQ ID NO: 97 - DNA, 1485 bp, synthetic construct
  misc_feature 1..1485: note = Variant of monoamine oxidase
  source 1..1485: mol_type = other DNA
atgaccagccgcgacggctatcagtggaccccggaaacgggtctgacccagggcgtaccgtccctgggtgtcatttcgccgccgactaacatcgaagataccgataaggacgggccttgggatgtcattgtcattgggggcgggtattgtgggctgaccgcaacccgtgatttaaccgtcgcagggttcaagacgctgctgctggaggcccgtgatcgtattggtggccgctcctggagcagtaatattgacggttacccgtatgagatgggtggcacttgggttcattggcatcaatctcacgtgtggcgtgaaatcacgcgttataaaatgcacaacgcgctgtctccatcatttaacttttcacgtggcgtgaatcacttccaactgcgtaccaatccgaccaccagtacgtacatgacgcacgaagcggaggatgaactgctgcgtagcgcattgcataaattcaccaatgtcgacggcactaatggccgtacagtgttgccgttcccacatgatatgttttatgtgccggaatttcgcaagtatgacgaaatgtcatattccgaacgcattgaccagatccgcgacgaactgtctttgaacgaacgctctagtttagaggctttcattttattatgtagcggtggcaccagtgaaaactccagctttggtgaatttctgcattggtgggcaatgtcgggttacacgtatcagggctgtatggattgtttaatctcctataaatttaaggatggccagagtgcgttcgcgcgtcgcttctgggaagaagccgctggcactggccgtctgggctatgtctttggttgtccggtgcgttctgtggtgaacgaacgcgacgcagtacgtgttaccgcacgtgacggtcgcgaattcgcagcgaaacgtttggtttgcacgattccgctgaacgtattgagttctgttcattttagcccaccactgtccccgcaacgcatggccgctgcgaacattggccatgttaaccagtgcgtcaaagtgcatgcggaagtcagttgtccggatatgcgttcatggtcgggtatctcctatccgttcaacaaattagcctacgctatcggcgatggcacgaccccagcgggtaatacgcatattgtgtgccttgggggggcccataatcatatccagccggaagaggacgtggaagcaacgaagatggccgttgaaaacatgtcgcctgggaatatggatatcaaacgtctggtcttccacaactggtgcaaggatgaatttgccaaaggcgcgtggttcttcgcccctccacagctgctgtcaaagagcctggatgaactgcgctgccgtcacggtaatgtcctgtttgcaaactccgattgggccttaggttggcgtggttttatcgatggtgctatcgaggagggcacccgcgcagcggttactgtaattgaggaactgcgtcctgcgcctgcggtgcgttcccacctg

SEQ ID NO: 98 - protein, 495 aa, synthetic construct
  REGION 1..495: note = Variant of monoamine oxidase
MTSRDGYQWTPETGLTQGVPSLGVISPPTNIEDTDKDGPWDVIVIGGGYCGLTATRDLTVAGFKTLLLEARDRIGGRSWSSNIDGYPYEMGGTWVHWHQSHVWREITRYKMHNALSPSFNFSRGVNHFQLRTNPTTSTYMTHEAEDELLRSALHKFTNVDGTNGRTVLPFPHDMFYVPEFRKYDEMSYSERIDQIRDELSLNERSSLEAFILLCSGGTSENSSFGEFLHWWAMSGYTYQGCMDCLISYKFKDGQSAFARRFWEEAAGTGRLGYVFGCPVRSVVNERDAVRVTARDGREFAAKRLVCTIPLNVLSSVHFSPPLSPQRMAAANIGHVNQCVKVHAEVSCPDMRSWSGISYPFNKLAYAIGDGTTPAGNTHIVCLGGAHNHIQPEEDVEATKMAVENMSPGNMDIKRLVFHNWCKDEFAKGAWFFAPPQLLSKSLDELRCRHGNVLFANSDWALGWRGFIDGAIEEGTRAAVTVIEELRPAPAVRSHL

SEQ ID NO: 99 - DNA, 1485 bp, synthetic construct
  misc_feature 1..1485: note = Variant of monoamine oxidase
  source 1..1485: mol_type = other DNA
atgaccagccgcgacggctatcagtggaccccggaaacgggtctgacccagggcgtaccgtccctgggtgtcatttcgccgccgactaacatcgaagataccgataaggacgggccttgggatgtcattgtcattgggggcgggtattgtgggctgaccgcaacccgtgatttaaccgtcgcagggttcaagacgctgctgctggaggcccgtgatcgtattggtggccgctcctggagcagtaatattgacggttacccgtatgagatgggtggcacttgggttcattggcatcaatctcacgtgtggcgtgaaatcacgcgttataaaatgcacaacgcgctgtctccatcatttaacttttcacgtggcgtgaatcacttccaactgcgtaccaatccgaccaccagtacgtacatgacgcacgaagcggaggatgaactgctgcgtagcgcattgcataaattcaccaatgtcgacggcactaatggccgtacagtgttgccgttcccacatgatatgttttatgtgccggaatttcgcaagtatgacgaaatgtcatattccgaacgcattgaccagatccgcgacgaactgtctttgaacgaacgctctagtttagaggctttcattttattatgtagcggtggcaccctggaaaactccagctttggtgaatttctgcattggtgggcaatgtcgggttacacgtatcagggctgtatggattgtttaatctcctataaatttaaggatggccagagtgcgttcgcgcgtcgcttctgggaagaagccgctggcactggccgtctgggctatgtctttggttgtccggtgcgttctgtggtgaacgaacgcgacgcagtacgtgttaccgcacgtgacggtcgcgaattcgcagcgaaacgtttggtttgcacgattccgctgaacgtattgagttctgttcattttagcccaccactgtccccgcaacgcatggccgctgcgaacctgggccatgttaaccagtgcgtcaaagtgcatgcggaagtcagttgtccggatatgcgttcatggtcgggtatctcctatccgttcaacaaattagcctacgctatcggcgatggcacgaccccagcgggtaatacgcatattgtgtgccttgggggggcccataatcatatccagccggaagaggacgtggaagcaacgaagatggccgttgaaaacatgtcgcctgggaatatggatatcaaacgtctggtcttccacaactggtgcaaggatgaatttgccaaaggcgcgtggttcttcgcccctccacagctgctgtcaaagagcctggatgaactgcgctgccgtcacggtaatgtcctgtttgcaaactccgattgggccttaggttggcgtggttttatcgatggtgctatcgaggagggcacccgcgcagcggttactgtaattgaggaactgcgtcctgcgcctgcggtgcgttcccacctg

SEQ ID NO: 100 - protein, 495 aa, synthetic construct
  REGION 1..495: note = Variant of monoamine oxidase
MTSRDGYQWTPETGLTQGVPSLGVISPPTNIEDTDKDGPWDVIVIGGGYCGLTATRDLTVAGFKTLLLEARDRIGGRSWSSNIDGYPYEMGGTWVHWHQSHVWREITRYKMHNALSPSFNFSRGVNHFQLRTNPTTSTYMTHEAEDELLRSALHKFTNVDGTNGRTVLPFPHDMFYVPEFRKYDEMSYSERIDQIRDELSLNERSSLEAFILLCSGGTLENSSFGEFLHWWAMSGYTYQGCMDCLISYKFKDGQSAFARRFWEEAAGTGRLGYVFGCPVRSVVNERDAVRVTARDGREFAAKRLVCTIPLNVLSSVHFSPPLSPQRMAAANLGHVNQCVKVHAEVSCPDMRSWSGISYPFNKLAYAIGDGTTPAGNTHIVCLGGAHNHIQPEEDVEATKMAVENMSPGNMDIKRLVFHNWCKDEFAKGAWFFAPPQLLSKSLDELRCRHGNVLFANSDWALGWRGFIDGAIEEGTRAAVTVIEELRPAPAVRSHL

SEQ ID NO: 101 - DNA, 1485 bp, synthetic construct
  misc_feature 1..1485: note = Variant of monoamine oxidase
  source 1..1485: mol_type = other DNA
atgaccagccgcgacggctatcagtggaccccggaaacgggtctgacccagggcgtaccgtccctgggtgtcatttcgccgccgactaacatcgaagataccgataaggacgggccttgggatgtcattgtcattgggggcgggtattgtgggctgaccgcaacccgtgatttaaccgtcgcagggttcaagacgctgctgctggaggcccgtgatcgtattggtggccgctcctggagcagtaatattgacggttacccgtatgagatgggtggcacttgggttcattggcatcaatctcacgtgtggcgtgaaatcacgcgttataaaatgcacaacgcgctgtctccatcatttaacttttcacgtggcgtgaatcacttccaactgcgtaccaatccgaccaccagtacgtacatgacgcacgaagcggaggatgaactgctgcgtagcgcattgcataaattcaccaatgtcgacggcactaatggccgtacagtgttgccgttcccacatgatatgttttatgtgccggaatttcgcaagtatgacgaaatgtcatattccgaacgcattgaccagatccgcgacgaactgtctttgaacgaacgctctagtttagaggctttcattttattatgtagcggtggcgggctggaaaactccagctttggtgaatttctgcattggtgggcaatgtcgggttacacgtatcagggctgtatggattgtttaatctcctataaatttaaggatggccagagtgcgttcgcgcgtcgcttctgggaagaagccgctggcactggccgtctgggctatgtctttggttgtccggtgcgttctgtggtgaacgaacgcgacgcagtacgtgttaccgcacgtgacggtcgcgaattcgcagcgaaacgtttggtttgcacgattccgctgaacgtattgagttctgttcattttagcccaccactgtccccgcaacgcatggccgctgcgaacattggccatgttaaccagtgcgtcaaagtgcatgcggaagtcagttgtccggatatgcgttcatggtcgggtatctcctatccgttcaacaaattagcctacgctatcggcgatggcacgaccccagcgggtaatacgcatattgtgtgccttgggggggcccataatcatatccagccggaagaggacgtggaagcaacgaagatggccgttgaaaacatgtcgcctgggaatatggatatcaaacgtctggtcttccacaactggtgcaaggatgaatttgccaaaggcgcgtggttcttcgcccctccacagctgctgtcaaagagcctggatgaactgcgctgccgtcacggtaatgtcctgtttgcaaactccgattgggccttaggttggcgtggttttatcgatggtgctatcgaggagggcacccgcgcagcggttactgtaattgaggaactgcgtcctgcgcctgcggtgcgttcccacctg

SEQ ID NO: 102 - protein, 495 aa, synthetic construct
  REGION 1..495: note = Variant of monoamine oxidase
MTSRDGYQWTPETGLTQGVPSLGVISPPTNIEDTDKDGPWDVIVIGGGYCGLTATRDLTVAGFKTLLLEARDRIGGRSWSSNIDGYPYEMGGTWVHWHQSHVWREITRYKMHNALSPSFNFSRGVNHFQLRTNPTTSTYMTHEAEDELLRSALHKFTNVDGTNGRTVLPFPHDMFYVPEFRKYDEMSYSERIDQIRDELSLNERSSLEAFILLCSGGGLENSSFGEFLHWWAMSGYTYQGCMDCLISYKFKDGQSAFARRFWEEAAGTGRLGYVFGCPVRSVVNERDAVRVTARDGREFAAKRLVCTIPLNVLSSVHFSPPLSPQRMAAANIGHVNQCVKVHAEVSCPDMRSWSGISYPFNKLAYAIGDGTTPAGNTHIVCLGGAHNHIQPEEDVEATKMAVENMSPGNMDIKRLVFHNWCKDEFAKGAWFFAPPQLLSKSLDELRCRHGNVLFANSDWALGWRGFIDGAIEEGTRAAVTVIEELRPAPAVRSHL

SEQ ID NO: 103 - DNA, 1485 bp, synthetic construct
  misc_feature 1..1485: note = Variant of monoamine oxidase
  source 1..1485: mol_type = other DNA
atgaccagccgcgacggctatcagtggaccccggaaacgggtctgacccagggcgtaccgtccctgggtgtcatttcgccgccgactaacatcgaagataccgataaggacgggccttgggatgtcattgtcattgggggggggtattgtgggctgaccgcaacccgtgatttaaccgtcgcagggttcaagacgctgctgctggaggcccgtgatcgtattggtggccgctcctggagcagtaatattgacggttacccgtatgagatgggtggcacttgggttcattggcatcaatctcacgtgtggcgtgaaatcacgcgttataaaatgcacaacgcgctgtctccatcatttaacttttcacgtggcgtgaatcacttccaactgcgtaccaatccgaccaccagtacgtacatgacgcacgaagcggaggatgaactgctgcgtagcgcattgcataaattcaccaatgtcgacggcactaatggccgtacagtgttgccgttcccacatgatatgttttatgtgccggaatttcgcaagtatgacgaaatgtcatattccgaacgcattgaccagatccgcgacgaactgtctttgaacgaacgctctagtttagaggctttcattttattatgtagcggtggcaccctggaaaactccagctttggtgaatttctgcattggtgggcaatgtcgggttacacgtatcagggctgtatggattgtttaatctcctataaatttaaggatggccagagtgcgttcgcgcgtcgcttctttgaagaagccgcaggcactggccgtctgggctatgtctttggttgtccggtgcgttctgtggtgaacgaacgcgacgcagtacgtgttaccgcacgtgacggtcgcgaattcgcagcgaaacgtttggtttgcacgattccgctgaacgtattgagttctgttcattttagcccaccactgtccccgcaacgcatggccgctgcgaacattggccatgttaaccagtgcgtcaaagtgcatgcggaagtcagttgtccggatatgcgttcatggtcgggtatctcctatccgttcaacaaattagcctacgctatcggcgatggcacgaccccagcgggtaatacgcatattgtgtgccttgggggggcccataatcatatccagccggaagaggacgtggaagcaacgaagatggccgttgaaaacatgtcgcctgggaatatggatatcaaacgtctggtcttccacaactggagcaaggatgaatttgccaaaggcgcgtggttcttcgcccctccacagctgctgtcaaagagcctggatgaactgcgcgcacgtcacggtaatgtcctgtttgcaaactccgattgggccttaggttggcgtggttttatcgatggtgctatcgaggagggcacccgcgcagcggttactgtaattgaggaactgcgtcctgcgcctgcggtgcgttcccacctg

SEQ ID NO: 104 - protein, 495 aa, synthetic construct
  REGION 1..495: note = Variant of monoamine oxidase
MTSRDGYQWTPETGLTQGVPSLGVISPPTNIEDTDKDGPWDVIVIGGGYCGLTATRDLTVAGFKTLLLEARDRIGGRSWSSNIDGYPYEMGGTWVHWHQSHVWREITRYKMHNALSPSFNFSRGVNHFQLRTNPTTSTYMTHEAEDELLRSALHKFTNVDGTNGRTVLPFPHDMFYVPEFRKYDEMSYSERIDQIRDELSLNERSSLEAFILLCSGGTLENSSFGEFLHWWAMSGYTYQGCMDCLISYKFKDGQSAFARRFFEEAAGTGRLGYVFGCPVRSVVNERDAVRVTARDGREFAAKRLVCTIPLNVLSSVHFSPPLSPQRMAAANIGHVNQCVKVHAEVSCPDMRSWSGISYPFNKLAYAIGDGTTPAGNTHIVCLGGAHNHIQPEEDVEATKMAVENMSPGNMDIKRLVFHNWSKDEFAKGAWFFAPPQLLSKSLDELRARHGNVLFANSDWALGWRGFIDGAIEEGTRAAVTVIEELRPAPAVRSHL

SEQ ID NO: 105 - DNA, 1485 bp, synthetic construct
  misc_feature 1..1485: note = Variant of monoamine oxidase
  source 1..1485: mol_type = other DNA
atgaccagccgcgacggctatcagtggaccccggaaacgggtctgacccagggcgtaccgtccctgggtgtcatttcgccgccgactaacatcgaagataccgataaggacgggccttgggatgtcattgtcattgggggcgggtattgtgggctgaccgcaacccgtgatttaaccgtcgcagggttcaagacgctgctgctggaggcccgtgatcgtattggtggccgctcctggagcagtaatattgacggttacccgtatgagatgggtggcacttgggttcattggcatcaatctcacgtgtggcgtgaaatcacgcgttataaaatgcacaacgcgctgtctccatcatttaacttttcacgtggcgtgaatcacttccaactgcgtaccaatccgaccaccagtacgtacatgacgcacgaagcggaggatgaactgctgcgtagcgcattgcataaattcaccaatgtcgacggcactaatggccgtacagtgttgccgttcccacatgatatgttttatgtgccggaatttcgcaagtatgacgaaatgtcatattccgaacgcattgaccagatccgcgacgaactgtctttgaacgaacgctctagtttagaggctttcattttattatgtagcggtggcaccctggaaaactccagctttggtgaatttctgcattggtgggcaatgtcgggttacacgtatcagggctgtattgattgtttaatctcctataaatttaaggatggccagagtgcgttcgcgcgtcgcttctgggaagaagccgctggcactggccgtctgggctatgtctttggttgtccggtgcgttctgtggtgaacgaacgcgacgcagtacgtgttaccgcacgtgacggtcgcgaattcgcagcgaaacgtttggtttgcacgattccgctgaacgtattgagttctgttcattttagcccaccactgtccccgcaacgcatggccgctgcgaacattggccatgttaaccagtgcgtcaaagtgcatgcggaagtcagttgtccggatatgcgttcatggtcgggtatctcctatccgttcaacaaattagcctacgctatcggcgatggcacgaccccagcgggtaatacgcatattgtgtgccttgggggggcccataatcatatccagccggaagaggacgtggaagcaacgaagatggccgttgaaaacatgtcgcctgggaatatggatatcaaacgtctggtcttccacaactggtgcaaggatgaatttgccaaaggcgcgtggttcttcgcccctccacagctgctgtcaaagagcctggatgaactgcgctgccgtcacggtaatgtcctgtttgcaaactccgattgggccttaggttggcgtggttttatcgatggtgctatcgaggagggcacccgcgcagcggttactgtaattgaggaactgcgtcctgcgcctgcggtgcgttcccacctg

SEQ ID NO: 106 - protein, 495 aa, synthetic construct
  REGION 1..495: note = Variant of monoamine oxidase
MTSRDGYQWTPETGLTQGVPSLGVISPPTNIEDTDKDGPWDVIVIGGGYCGLTATRDLTVAGFKTLLLEARDRIGGRSWSSNIDGYPYEMGGTWVHWHQSHVWREITRYKMHNALSPSFNFSRGVNHFQLRTNPTTSTYMTHEAEDELLRSALHKFTNVDGTNGRTVLPFPHDMFYVPEFRKYDEMSYSERIDQIRDELSLNERSSLEAFILLCSGGTLENSSFGEFLHWWAMSGYTYQGCIDCLISYKFKDGQSAFARRFWEEAAGTGRLGYVFGCPVRSVVNERDAVRVTARDGREFAAKRLVCTIPLNVLSSVHFSPPLSPQRMAAANIGHVNQCVKVHAEVSCPDMRSWSGISYPFNKLAYAIGDGTTPAGNTHIVCLGGAHNHIQPEEDVEATKMAVENMSPGNMDIKRLVFHNWCKDEFAKGAWFFAPPQLLSKSLDELRCRHGNVLFANSDWALGWRGFIDGAIEEGTRAAVTVIEELRPAPAVRSHL

SEQ ID NO: 107 - DNA, 1485 bp, synthetic construct
  misc_feature 1..1485: note = Variant of monoamine oxidase
  source 1..1485: mol_type = other DNA
atgaccagccgcgacggctatcagtggaccccggaaacgggtctgacccagggcgtaccgtccctgggtgtcatttcgccgccgactaacatcgaagataccgataaggacgggccttgggatgtcattgtcattgggggcgggtattgtgggctgaccgcaacccgtgatttaaccgtcgcagggttcaagacgctgctgctggaggcccgtgatcgtattggtggccgctcctggagcagtaatattgacggttacccgtatgagatgggtggcacttgggttcattggcatcaatctcacgtgtggcgtgaaatcacgcgttataaaatgcacaacgcgctgtctccatcatttaacttttcacgtggcgtgaatcacttccaactgcgtaccaatccgaccaccagtacgtacatgacgcacgaagcggaggatgaactgctgcgtagcgcattgcataaattcaccaatgtcgacggcactaatggccgtacagtgttgccgttcccacatgatatgttttatgtgccggaatttcgcaagtatgacgaaatgtcatattccgaacgcattgaccagatccgcgacgaactgtctttgaacgaacgctctagtttagaggctttcattttattatgtagcggtggcaccctggaaaactccagctttggtgaatttctgcattggtgggcaatgtcgggttacacgtatcagggctgtatggattgtttaatctcctataaatttaaggatggccagagtgcgttcgcgcgtcgcttctgggaagaagccgctggcactggccgtctgggctatgtctttggttgtccggtgcgttctgtggtgaacgaacgcgacgcagtacgtgttaccgcacgtgacggtcgcgaattcgcagcgaaacgtttggtttgcacgattccgctgaacgtattgagttctgttcattttagcccaccactgtccccgcaacgcatggccgctgcgaacattggccatgttaaccagtgcgtcaaagtgcatgcggaagtcagttgtccggatatgcgttcatggtcgggtatctcctatccgttcaacaaattagcctacgctatcggcgatggcacgaccccagcgggtaatacgcatattgtgtgccttgggggggcccataatcatatccagccggaagaggacgtggaagcaacgaagatggccgttgaaaacatgtcgcctgggaatatggatatcaaacgtctggtcttccacaactggtgcaaggatgaatttgccaaaggcgcgtggttcttcgcccctccacagctgctgtcaaagagcctggatgaaaggcgctgccgtcacggtaatgtcctgtttgcaaactccgattgggccttaggttggcgtggttttatcgatggtgctatcgaggagggcacccgcgcagcggttactgtaattgaggaactgcgtcctgcgcctgcggtgcgttcccacctg

SEQ ID NO: 108 - protein, 495 aa, synthetic construct
  REGION 1..495: note = Variant of monoamine oxidase
MTSRDGYQWTPETGLTQGVPSLGVISPPTNIEDTDKDGPWDVIVIGGGYCGLTATRDLTVAGFKTLLLEARDRIGGRSWSSNIDGYPYEMGGTWVHWHQSHVWREITRYKMHNALSPSFNFSRGVNHFQLRTNPTTSTYMTHEAEDELLRSALHKFTNVDGTNGRTVLPFPHDMFYVPEFRKYDEMSYSERIDQIRDELSLNERSSLEAFILLCSGGTLENSSFGEFLHWWAMSGYTYQGCMDCLISYKFKDGQSAFARRFWEEAAGTGRLGYVFGCPVRSVVNERDAVRVTARDGREFAAKRLVCTIPLNVLSSVHFSPPLSPQRMAAANIGHVNQCVKVHAEVSCPDMRSWSGISYPFNKLAYAIGDGTTPAGNTHIVCLGGAHNHIQPEEDVEATKMAVENMSPGNMDIKRLVFHNWCKDEFAKGAWFFAPPQLLSKSLDERRCRHGNVLFANSDWALGWRGFIDGAIEEGTRAAVTVIEELRPAPAVRSHL

SEQ ID NO: 109 - DNA, 1485 bp, synthetic construct
  misc_feature 1..1485: note = Variant of monoamine oxidase
  source 1..1485: mol_type = other DNA
atgaccagccgcgacggctatcagtggaccccggaaacgggtctgacccagggcgtaccgtccctgggtgtcatttcgccgccgactaacatcgaagataccgataaggacgggccttgggatgtcattgtcattgggggcgggtattgtgggctgaccgcaacccgtgatttaaccgtcgcagggttcaagacgctgctgctggaggcccgtgatcgtattggtggccgctcctggagcagtaatattgacggttacccgtatgagatgggtggcacttgggttcattggcatcaatctcacgtgtggcgtgaaatcacgcgttataaaatgcacaacgcgctgtctccatcatttaacttttcacgtggcgtgaatcacttccaactgcgtaccaatccgaccaccagtacgtacatgacgcacgaagcggaggatgaactgctgcgtagcgcattgcataaattcaccaatgtcgacggcactaatggccgtacagtgttgccgttcccacatgatatgttttatgtgccggaatttcgcaagtatgacgaaatgtcatattccgaacgcattgaccagatccgcgacgaactgtctttgaacgaacgctctagtttagaggctttcattttattatgtagcggtggcaccctggaaaactccagctttggtgaatttctgcattggtgggcaatgtcgggttacacgtatcagggctgtatggattgtttaatctcctataaatttaaggatggccagagtgcgttcgcgcgtcgcttctgggaagaagccgctggcactggccgtctgggctatgtctttggttgtccggtgcgttctgtggtgaacgaacgcgacgcagtacgtgttaccgcacgtgacggtcgcgaattcgcagcgaaacgtttggtttgcacgattccgctgaacgtattgagttctgttcattttagcccaccactgtccccgcaacgcatggccgctgcgaacattggccatgttaaccagtgcgtcaaagtgcatgcggaagtcagttgtccggatatgcgttcatggtcgggtatctcctatccgttcaacaaattagcctacgctatcggcgatggcacgaccccagcgggtaatacgcatattgtgtgccttgggggggccgagaatcatatccagccggaagaggacgtggaagcaacgaagatggccgttgaaaacatgtcgcctgggaatatggatatcaaacgtctggtcttccacaactggtgcaaggatgaatttgccaaaggcgcgtggttcttcgcccctccacagctgctgtcaaagagcctggatgaactgcgctgccgtcacggtaatgtcctgtttgcaaactccgattgggccttaggttggcgtggttttatcgatggtgctatcgaggagggcacccgcgcagcggttactgtaattgaggaactgcgtcctgcgcctgcggtgcgttcccacctg

SEQ ID NO: 110 - protein, 495 aa, synthetic construct
  REGION 1..495: note = Variant of monoamine oxidase
MTSRDGYQWTPETGLTQGVPSLGVISPPTNIEDTDKDGPWDVIVIGGGYCGLTATRDLTVAGFKTLLLEARDRIGGRSWSSNIDGYPYEMGGTWVHWHQSHVWREITRYKMHNALSPSFNFSRGVNHFQLRTNPTTSTYMTHEAEDELLRSALHKFTNVDGTNGRTVLPFPHDMFYVPEFRKYDEMSYSERIDQIRDELSLNERSSLEAFILLCSGGTLENSSFGEFLHWWAMSGYTYQGCMDCLISYKFKDGQSAFARRFWEEAAGTGRLGYVFGCPVRSVVNERDAVRVTARDGREFAAKRLVCTIPLNVLSSVHFSPPLSPQRMAAANIGHVNQCVKVHAEVSCPDMRSWSGISYPFNKLAYAIGDGTTPAGNTHIVCLGGAENHIQPEEDVEATKMAVENMSPGNMDIKRLVFHNWCKDEFAKGAWFFAPPQLLSKSLDELRCRHGNVLFANSDWALGWRGFIDGAIEEGTRAAVTVIEELRPAPAVRSHL

SEQ ID NO: 111 - DNA, 1485 bp, synthetic construct
  misc_feature 1..1485: note = Variant of monoamine oxidase
  source 1..1485: mol_type = other DNA
atgaccagccgcgacggctatcagtggaccccggaaacgggtctgacccagggcgtaccgtccctgggtgtcatttcgccgccgactaacatcgaagataccgataaggacgggccttgggatgtcattgtcattgggggcgggtattgtgggctgaccgcaacccgtgatttaaccgtcgcagggttcaagacgctgctgctggaggcccgtgatcgtattggtggccgctcctggagcagtaatattgacggttacccgtatgagatgggtggcacttgggttcattggcatcaatctcacgtgtggcgtgaaatcacgcgttataaaatgcacaacgcgctgtctccatcatttaacttttcacgtggcgtgaatcacttccaactgcgtaccaatccgaccaccagtacgtacatgacgcacgaagcggaggatgaactgctgcgtagcgcattgcataaattcaccaatgtcgacggcactaatggccgtacagtgttgccgttcccacatgatatgttttatgtgccggaatttccgaagtatgacgaaatgtcatattccgaacgcattgaccagatccgcgacgaactgtctttgaacgaacgctctagtttagaggctttcattttattatgtagcggtggcaccctggaaaactccagctttggtgaatttctgcattggtgggcaatgtcgggttacacgtatcagggctgtatggattgtttaatctcctataaatttaaggatggccagagtgcgttcgcgcgtcgcttctgggaagaagccgctggcactggccgtctgggctatgtctttggttgtccggtgcgttctgtggtgaacgaacgcgacgcagtacgtgttaccgcacgtgacggtcgcgaattcgcagcgaaacgtttggtttgcacgattccgctgaacgtattgagttctgttcattttagcccaccactgtccccgcaacgcatggccgctgcgaacattggccatgttaaccagtgcgtcaaagtgcatgcggaagtcagttgtccggatatgcgttcatggtcgggtatctcctatccgttcaacaaattagcctacgctatcggcgatggcacgaccccagcgggtaatacgcatattgtgtgccttgggggggcccataatcatatccagccggaagaggacgtggaagcaacgaagatggccgttgaaaacatgtcgcctgggaatatggatatcaaacgtctggtcttccacaactggtgcaaggatgaatttgccaaaggcgcgtggttcttcgcccctccacagctgctgtcaaagagcctggatgaactgcgctgccgtcacggtaatgtcctgtttgcaaactccgattgggccttaggttggcgtggttttatcgatggtgctatcgaggagggcacccgcgcagcggttactgtaattgaggaactgcgtcctgcgcctgcggtgcgttcccacctg

SEQ ID NO: 112 - protein, 495 aa, synthetic construct
  REGION 1..495: note = Variant of monoamine oxidase
MTSRDGYQWTPETGLTQGVPSLGVISPPTNIEDTDKDGPWDVIVIGGGYCGLTATRDLTVAGFKTLLLEARDRIGGRSWSSNIDGYPYEMGGTWVHWHQSHVWREITRYKMHNALSPSFNFSRGVNHFQLRTNPTTSTYMTHEAEDELLRSALHKFTNVDGTNGRTVLPFPHDMFYVPEFPKYDEMSYSERIDQIRDELSLNERSSLEAFILLCSGGTLENSSFGEFLHWWAMSGYTYQGCMDCLISYKFKDGQSAFARRFWEEAAGTGRLGYVFGCPVRSVVNERDAVRVTARDGREFAAKRLVCTIPLNVLSSVHFSPPLSPQRMAAANIGHVNQCVKVHAEVSCPDMRSWSGISYPFNKLAYAIGDGTTPAGNTHIVCLGGAHNHIQPEEDVEATKMAVENMSPGNMDIKRLVFHNWCKDEFAKGAWFFAPPQLLSKSLDELRCRHGNVLFANSDWALGWRGFIDGAIEEGTRAAVTVIEELRPAPAVRSHL

SEQ ID NO: 113 - DNA, 1485 bp, synthetic construct
  misc_feature 1..1485: note = Variant of monoamine oxidase
  source 1..1485: mol_type = other DNA
atgaccagccgcgacggctatcagtggaccccggaaacgggtctgacccagggcgtaccgtccctgggtgtcatttcgccgccgactaacatcgaagataccgataaggacgggccttgggatgtcattgtcattgggggggggtattgtgggctgaccgcaacccgtgatttaaccgtcgcagggttcaagacgctgctgctggaggcccgtgatcgtattggtggccgctcctggagcagtaatattgacggttacccgtatgagatgggtggcacttgggttcattggcatcaatcgcacgtgtggcgtgaaatcacgcgttataaaatgcacaacgcgctgtctccatcatttaacttttcacgtggcgtgaatcacttccaactgcgtaccaatccgaccaccagtacgtacatgacgcacgaagcggaggatgaactgctgcgtagcgcattgcataaattcaccaatgtcgacggcactaatggccgtacagtgttgccgttcccacatgatatgttttatgtgccggaatttcgcaagtatgacgaaatgtcatattccgaacgcattgaccagatccgcgacgaactgagcctgaacgaacgctctagtttagaggctttcattttattatgtagcggtggcaccctggaaaactccagctttggtgaatttctgcattggtgggcaatgtcgggttacacgtatcagggctgtatggattgtttaatctcctataaatttaaggatggccagagtgcgttcgcgcgtcgcttctgggaagaagccgcaggcactggccgtctgggctatgtctttggttgtccggtgcgttctgtggtgaacgaacgcgacgcagtacgtgttaccgcacgtgacggtcgcgaattcgcagcgaaacgtttggtttgcacgattccgctgaacgtattgagttctgttcattttagcccaccactgtccccgcaacgcatggccgctgcgaacattggccatgttaaccagtgcgtcaaagtgcatgcggaagtcagttgtccggatatgcgttcatggtcgggtatttcctatccgttcaacaaattagcctacgctatcggcgatggcacgaccccagcgggtaatacgcatattgtgtgccttgggggggcccataatcatatccagccggaagaggacgtggaagcaacgaagatggccgttgaaaacatgtcgcctgggaatatggatatcaaacgtctggtcttccacaactggagcaaggatgaatttgccaaaggcgcgtggttcttcgcccctccacagctgctgtcaaagagcctggatgaactgcgctgccgtcacggtaatgtcctgtttgcaaactccgattgggccttaggttggcgtggttttatcgatggtgctatcgaggagggcacccgcgcagcggttactgtaattgaggaactgcgtcctgcgcctgcggtgcgttcccacctg

SEQ ID NO: 114 - protein, 495 aa, synthetic construct
  REGION 1..495: note = Variant of monoamine oxidase
MTSRDGYQWTPETGLTQGVPSLGVISPPTNIEDTDKDGPWDVIVIGGGYCGLTATRDLTVAGFKTLLLEARDRIGGRSWSSNIDGYPYEMGGTWVHWHQSHVWREITRYKMHNALSPSFNFSRGVNHFQLRTNPTTSTYMTHEAEDELLRSALHKFTNVDGTNGRTVLPFPHDMFYVPEFRKYDEMSYSERIDQIRDELSLNERSSLEAFILLCSGGTLENSSFGEFLHWWAMSGYTYQGCMDCLISYKFKDGQSAFARRFWEEAAGTGRLGYVFGCPVRSVVNERDAVRVTARDGREFAAKRLVCTIPLNVLSSVHFSPPLSPQRMAAANIGHVNQCVKVHAEVSCPDMRSWSGISYPFNKLAYAIGDGTTPAGNTHIVCLGGAHNHIQPEEDVEATKMAVENMSPGNMDIKRLVFHNWSKDEFAKGAWFFAPPQLLSKSLDELRCRHGNVLFANSDWALGWRGFIDGAIEEGTRAAVTVIEELRPAPAVRSHL

SEQ ID NO: 115 - DNA, 1485 bp, synthetic construct
  misc_feature 1..1485: note = Variant of monoamine oxidase
  source 1..1485: mol_type = other DNA
atgaccagccgcgacggctatcagtggaccccggaaacgggtctgacccagggcgtaccgtccctgggtgtcatttcgccgccgactaacatcgaagataccgataaggacgggccttgggatgtcattgtcattgggggcgggtattgtgggctgaccgcaacccgtgatttaaccgtcgcagggttcaagacgctgctgctggaggcccgtgatcgtattggtggccgctcctggagcagtaatattgacggttacccgtatgagatgggtggcacttgggttcattggcatcaatctcacgtgtggcgtgaaatcacgcgttataaaatgcacaacgcgctgtctccatcatttaacttttcacgtggcgtgaatcacttccaactgcgtaccaatccgaccaccagtacgtacatgacgcacgaagcggaggatgaactgctgcgtagcgcattgcataaattcaccaatgtcgacggcactaatggccgtacagtgttgccgttcccacatgatatgttttatgtgccggaatttcgcaagtatgacgaaatgtcatattccgaacgcattgaccagatccgcgacgaactgtctttgaacgaacgctctagtttagaggctttcattttattatgtagcggtggcaccctggaaaactccagctttggtgaatttctgcattggtgggcaatgtcgggttacacgtatcagggctgtatggattgtttaatctcctataaatttaaggatggccagagtgcgttcgcgcgtcgcttctgggaagaagccgctggcactggccgtctgggctatgtctttggttgtccggtgcgttctgtggtgaacgaacgcgacgcagtacgtgttaccgcacgtgacggtcgcgaattcgcagcgaaacgtttggtttgcacgattccgctgaacgtattgagttctgttcattttagcccaccactgtccccgcaacgcatggccgctgcgaacattggccatgttaaccagtgcgtcaaagtgcatgcggaagtcagttgtccggatatgcgttcatggtcgggtatctcctatccgttcaacaaattagcctacgctatcggcgatggcacgaccccagcgggtaatacgcatattgtgtgccttgggggggcccataatcatatccagccggaagaggacgtggaagcaacgaagatggccgttgaaaacatgtcgcctgggaatatggatatcaaacgtctggtcttccacaactggtgcaaggatgaactggccaaaggcgcgtggttcttcgcccctccacagctgctgtcaaagagcctggatgaactgcgctgccgtcacggtaatgtcctgtttgcaaactccgattgggccttaggttggcgtggttttatcgatggtgctatcgaggagggcacccgcgcagcggttactgtaattgaggaactgcgtcctgcgcctgcggtgcgttcccacctg

SEQ ID NO: 116 - protein, 495 aa, synthetic construct
  REGION 1..495: note = Variant of monoamine oxidase
MTSRDGYQWTPETGLTQGVPSLGVISPPTNIEDTDKDGPWDVIVIGGGYCGLTATRDLTVAGFKTLLLEARDRIGGRSWSSNIDGYPYEMGGTWVHWHQSHVWREITRYKMHNALSPSFNFSRGVNHFQLRTNPTTSTYMTHEAEDELLRSALHKFTNVDGTNGRTVLPFPHDMFYVPEFRKYDEMSYSERIDQIRDELSLNERSSLEAFILLCSGGTLENSSFGEFLHWWAMSGYTYQGCMDCLISYKFKDGQSAFARRFWEEAAGTGRLGYVFGCPVRSVVNERDAVRVTARDGREFAAKRLVCTIPLNVLSSVHFSPPLSPQRMAAANIGHVNQCVKVHAEVSCPDMRSWSGISYPFNKLAYAIGDGTTPAGNTHIVCLGGAHNHIQPEEDVEATKMAVENMSPGNMDIKRLVFHNWCKDELAKGAWFFAPPQLLSKSLDELRCRHGNVLFANSDWALGWRGFIDGAIEEGTRAAVTVIEELRPAPAVRSHL

SEQ ID NO: 117 - DNA, 1485 bp, synthetic construct
  misc_feature 1..1485: note = Variant of monoamine oxidase
  source 1..1485: mol_type = other DNA
atgaccagccgcgacggctatcagtggaccccggaaacgggtctgacccagggcgtaccgtccctgggtgtcatttcgccgccgactaacatcgaagataccgataaggacgggccttgggatgtcattgtcattgggggcgggtattgtgggctgaccgcaacccgtgatttaaccgtcgcagggttcaagacgctgctgctggaggcccgtgatcgtattggtggccgctcctggagcagtaatattgacggttacccgtatgagatgggtggcacttgggttcattggcatcaatctcacgtgtggcgtgaaatcacgcgttataaaatgcacaacgcgctgtctccatcatttaacttttcacgtggcgtgaatcacttccaactgcgtaccaatccgaccaccagtacgtacatgacgcacgaagcggaggatgaactgctgcgtagcgcattgcataaattcaccaatgtcgacggcactaatggccgtacagtgttgccgttcccacatgatatgttttatgtgccggaatttcgcaagtatgacgaaatgtcatattccgaacgcattgaccagatccgcgacgaaacttctttgaacgaacgctctagtttagaggctttcattttattatgtagcggtggcaccctggaaaactccagctttggtgaatttctgcattggtgggcaatgtcgggttacacgtatcagggctgtatggattgtttaatctcctataaatttaaggatggccagagtgcgttcgcgcgtcgcttctgggaagaagccgctggcactggccgtctgggctatgtctttggttgtccggtgcgttctgtggtgaacgaacgcgacgcagtacgtgttaccgcacgtgacggtcgcgaattcgcagcgaaacgtttggtttgcacgattccgctgaacgtattgagttctgttcattttagcccaccactgtccccgcaacgcatggccgctgcgaacattggccatgttaaccagtgcgtcaaagtgcatgcggaagtcagttgtccggatatgcgttcatggtcgggtatctcctatccgttcaacaaattagcctacgctatcggcgatggcacgaccccagcgggtaatacgcatattgtgtgccttgggggggcccataatcatatccagccggaagaggacgtggaagcaacgaagatggccgttgaaaacatgtcgcctgggaatatggatatcaaacgtctggtcttccacaactggtgcaaggatgaatttgccaaaggcgcgtggttcttcgcccctccacagctgctgtcaaagagcctggatgaactgcgctgccgtcacggtaatgtcctgtttgcaaactccgattgggccttaggttggcgtggttttatcgatggtgctatcgaggagggcacccgcgcagcggttactgtaattgaggaactgcgtcctgcgcctgcggtgcgttcccacctg

SEQ ID NO: 118 - protein, 495 aa, synthetic construct
  REGION 1..495: note = Variant of monoamine oxidase
MTSRDGYQWTPETGLTQGVPSLGVISPPTNIEDTDKDGPWDVIVIGGGYCGLTATRDLTVAGFKTLLLEARDRIGGRSWSSNIDGYPYEMGGTWVHWHQSHVWREITRYKMHNALSPSFNFSRGVNHFQLRTNPTTSTYMTHEAEDELLRSALHKFTNVDGTNGRTVLPFPHDMFYVPEFRKYDEMSYSERIDQIRDETSLNERSSLEAFILLCSGGTLENSSFGEFLHWWAMSGYTYQGCMDCLISYKFKDGQSAFARRFWEEAAGTGRLGYVFGCPVRSVVNERDAVRVTARDGREFAAKRLVCTIPLNVLSSVHFSPPLSPQRMAAANIGHVNQCVKVHAEVSCPDMRSWSGISYPFNKLAYAIGDGTTPAGNTHIVCLGGAHNHIQPEEDVEATKMAVENMSPGNMDIKRLVFHNWCKDEFAKGAWFFAPPQLLSKSLDELRCRHGNVLFANSDWALGWRGFIDGAIEEGTRAAVTVIEELRPAPAVRSHL

SEQ ID NO: 119 - DNA, 1485 bp, synthetic construct
  misc_feature 1..1485: note = Variant of monoamine oxidase
  source 1..1485: mol_type = other DNA
atgaccagccgcgacggctatcagtggaccccggaaacgggtctgacccagggcgtaccgtccctgggtgtcatttcgccgccgactaacatcgaagataccgataaggacgggccttgggatgtcattgtcattgggggcgggtattgtgggctgaccgcaacccgtgatttaaccgtcgcagggttcaagacgctgctgctggaggcccgtgatcgtattggtggccgctcctggagcagtaatattgacggttacccgtatgagatgggtggcacttgggttcattggcatcaatctcacgtgtggcgtgaaatcacgcgttataaaatgcacaacgcgatgtctccatcatttaacttttcacgtggcgtgaatcacttccaactgcgtaccaatccgaccaccagtacgtacatgacgcacgaagcggaggatgaactgctgcgtagcgcattgcataaattcaccaatgtcgacggcactaatggccgtacagtgttgccgttcccacatgatatgttttatgtgccggaatttcgcaagtatgacgaaatgtcatattccgaacgcattgaccagatccgcgacgaactgtctttgaacgaacgctctagtttagaggctttcattttattatgtagcggtggcaccctggaaaactccagctttggtgaatttctgcattggtgggcaatgtcgggttacacgtatcagggctgtatggattgtttaatctcctataaatttaaggatggccagagtgcgttcgcgcgtcgcttctgggaagaagccgctggcactggccgtctgggctatgtctttggttgtccggtgcgttctgtggtgaacgaacgcgacgcagtacgtgttaccgcacgtgacggtcgcgaattcgcagcgaaacgtttggtttgcacgattccgctgaacgtattgagttctgttcattttagcccaccactgtccccgcaacgcatggccgctgcgaacattggccatgttaaccagtgcgtcaaagtgcatgcggaagtcagttgtccggatatgcgttcatggtcgggtatctcctatccgttcaacaaattagcctacgctatcggcgatggcacgaccccagcgggtaatacgcatattgtgtgccttgggggggcccataatcatatccagccggaagaggacgtggaagcaacgaagatggccgttgaaaacatgtcgcctgggaatatggatatcaaacgtctggtcttccacaactggtgcaaggatgaatttgccaaaggcgcgtggttcttcgcccctccacagctgctgtcaaagagcctggatgaactgcgctgccgtcacggtaatgtcctgtttgcaaactccgattgggccttaggttggcgtggttttatcgatggtgctatcgaggagggcacccgcgcagcggttactgtaattgaggaactgcgtcctgcgcctgcggtgcgttcccacctg

SEQ ID NO: 120 - protein, 495 aa, synthetic construct
  REGION 1..495: note = Variant of monoamine oxidase
MTSRDGYQWTPETGLTQGVPSLGVISPPTNIEDTDKDGPWDVIVIGGGYCGLTATRDLTVAGFKTLLLEARDRIGGRSWSSNIDGYPYEMGGTWVHWHQSHVWREITRYKMHNAMSPSFNFSRGVNHFQLRTNPTTSTYMTHEAEDELLRSALHKFTNVDGTNGRTVLPFPHDMFYVPEFRKYDEMSYSERIDQIRDELSLNERSSLEAFILLCSGGTLENSSFGEFLHWWAMSGYTYQGCMDCLISYKFKDGQSAFARRFWEEAAGTGRLGYVFGCPVRSVVNERDAVRVTARDGREFAAKRLVCTIPLNVLSSVHFSPPLSPQRMAAANIGHVNQCVKVHAEVSCPDMRSWSGISYPFNKLAYAIGDGTTPAGNTHIVCLGGAHNHIQPEEDVEATKMAVENMSPGNMDIKRLVFHNWCKDEFAKGAWFFAPPQLLSKSLDELRCRHGNVLFANSDWALGWRGFIDGAIEEGTRAAVTVIEELRPAPAVRSHL

SEQ ID NO: 121 - DNA, 1485 bp, synthetic construct
  misc_feature 1..1485: note = Variant of monoamine oxidase
  source 1..1485: mol_type = other DNA
atgaccagccgcgacggctatcagtggaccccggaaacgggtctgacccagggcgtaccgtccctgggtgtcatttcgccgccgactaacatcgaagataccgataaggacgggccttgggatgtcattgtcattgggggcgggtattgtgggctgaccgcaacccgtgatttaaccgtcgcagggttcaagacgctgctgctggaggcccgtgatcgtattggtggccgctcctggagcagtaatattgacggttacccgtatgagatgggtggcacttgggttcattggcatcaatctcacgtgtggcgtgaaatcacgcgttataaaatgcacaacgcgctgtctccatcatttaacttttcacgtggcgtgaatcacttccaactgcgtaccaatccgaccaccagtacgtacatgacgcacgaagcggaggatgaactgctgcgtagcgcattgcataaattcaccaatgtcgacggcactaatggccgtacagtgttgccgaagccacatgatatgttttatgtgccggaatttcgcaagtatgacgaaatgtcatattccgaacgcattgaccagatccgcgacgaactgtctttgaacgaacgctctagtttagaggctttcattttattatgtagcggtggcaccctggaaaactccagctttggtgaatttctgcattggtgggcaatgtcgggttacacgtatcagggctgtatggattgtttaatctcctataaatttaaggatggccagagtgcgttcgcgcgtcgcttctgggaagaagccgctggcactggccgtctgggctatgtctttggttgtccggtgcgttctgtggtgaacgaacgcgacgcagtacgtgttaccgcacgtgacggtcgcgaattcgcagcgaaacgtttggtttgcacgattccgctgaacgtattgagttctgttcattttagcccaccactgtccccgcaacgcatggccgctgcgaacattggccatgttaaccagtgcgtcaaagtgcatgcggaagtcagttgtccggatatgcgttcatggtcgggtatctcctatccgttcaacaaattagcctacgctatcggcgatggcacgaccccagcgggtaatacgcatattgtgtgccttgggggggcccataatcatatccagccggaagaggacgtggaagcaacgaagatggccgttgaaaacatgtcgcctgggaatatggatatcaaacgtctggtcttccacaactggtgcaaggatgaatttgccaaaggcgcgtggttcttcgcccctccacagctgctgtcaaagagcctggatgaactgcgctgccgtcacggtaatgtcctgtttgcaaactccgattgggccttaggttggcgtggttttatcgatggtgctatcgaggagggcacccgcgcagcggttactgtaattgaggaactgcgtcctgcgcctgcggtgcgttcccacctg

SEQ ID NO: 122 - protein, 495 aa, synthetic construct
  REGION 1..495: note = Variant of monoamine oxidase
MTSRDGYQWTPETGLTQGVPSLGVISPPTNIEDTDKDGPWDVIVIGGGYCGLTATRDLTVAGFKTLLLEARDRIGGRSWSSNIDGYPYEMGGTWVHWHQSHVWREITRYKMHNALSPSFNFSRGVNHFQLRTNPTTSTYMTHEAEDELLRSALHKFTNVDGTNGRTVLPKPHDMFYVPEFRKYDEMSYSERIDQIRDELSLNERSSLEAFILLCSGGTLENSSFGEFLHWWAMSGYTYQGCMDCLISYKFKDGQSAFARRFWEEAAGTGRLGYVFGCPVRSVVNERDAVRVTARDGREFAAKRLVCTIPLNVLSSVHFSPPLSPQRMAAANIGHVNQCVKVHAEVSCPDMRSWSGISYPFNKLAYAIGDGTTPAGNTHIVCLGGAHNHIQPEEDVEATKMAVENMSPGNMDIKRLVFHNWCKDEFAKGAWFFAPPQLLSKSLDELRCRHGNVLFANSDWALGWRGFIDGAIEEGTRAAVTVIEELRPAPAVRSHL

SEQ ID NO: 123 - DNA, 1485 bp, synthetic construct
  misc_feature 1..1485: note = Variant of monoamine oxidase
  source 1..1485: mol_type = other DNA
atgaccagccgcgacggctatcagtggaccccggaaacgggtctgacccagggcgtaccgtccctgggtgtcatttcgccgccgactaacatcgaagataccgataaggacgggccttgggatgtcattgtcattgggggcgggtattgtgggctgaccgcaacccgtgatttaaccgtcgcagggttcaagacgctgctgctggaggcccgtgatcgtattggtggccgctcctggagcagtaatattgacggttacccgtatgagatgggtggcacttgggttcattggcatcaatctcacgtgtggcgtgaaatcacgcgttataaaatgcacaacgcgctgtctccatcatttaacttttcacgtggcgtgaatcacttccaactgcgtaccaatccgaccaccagtacgtacatgacgcacgaagcggaggatgaactgctgcgtagcgcattgcataaattcaccaatgtcgacggcactaatggccgtacagtgttgccgttcccacatgatatgttttatgtgccggaatttcgcaagtatgacgaaatgtcatattccgaacgcattgaccagatccgcgacgaactgtctttgaacgaacgctctagtttagaggctttcattttattatgtagcggtggcaccctggaaaactccagctttggtgaatttctgcattggtgggcaatgtcgggttacacgtatcagggctgtatggattgtttaatctcctataaatttaaggatggccagagtgcgttcgcgcgtcgcttctgggaagaagccgctggcactggccgtctgggctatgtctttggttgtccggtgcgttctgtggtgaacgaacgcgacgcagtacgtgttaccgcacgtgacggtcgcgaattcgcagcgaaacgtttggtttgcacgattccgctgaacgtattgagttctgttcattttagcccaccactgtccccgcaacgcatggccgctgcgaacagtggccatgttaaccagtgcgtcaaagtgcatgcggaagtcagttgtccggatatgcgttcatggtcgggtatctcctatccgttcaacaaattagcctacgctatcggcgatggcacgaccccagcgggtaatacgcatattgtgtgccttgggggggcccataatcatatccagccggaagaggacgtggaagcaacgaagatggccgttgaaaacatgtcgcctgggaatatggatatcaaacgtctggtcttccacaactggtgcaaggatgaatttgccaaaggcgcgtggttcttcgcccctccacagctgctgtcaaagagcctggatgaactgcgctgccgtcacggtaatgtcctgtttgcaaactccgattgggccttaggttggcgtggttttatcgatggtgctatcgaggagggcacccgcgcagcggttactgtaattgaggaactgcgtcctgcgcctgcggtgcgttcccacctg

SEQ ID NO: 124 - protein, 495 aa, synthetic construct
  REGION 1..495: note = Variant of monoamine oxidase
MTSRDGYQWTPETGLTQGVPSLGVISPPTNIEDTDKDGPWDVIVIGGGYCGLTATRDLTVAGFKTLLLEARDRIGGRSWSSNIDGYPYEMGGTWVHWHQSHVWREITRYKMHNALSPSFNFSRGVNHFQLRTNPTTSTYMTHEAEDELLRSALHKFTNVDGTNGRTVLPFPHDMFYVPEFRKYDEMSYSERIDQIRDELSLNERSSLEAFILLCSGGTLENSSFGEFLHWWAMSGYTYQGCMDCLISYKFKDGQSAFARRFWEEAAGTGRLGYVFGCPVRSVVNERDAVRVTARDGREFAAKRLVCTIPLNVLSSVHFSPPLSPQRMAAANSGHVNQCVKVHAEVSCPDMRSWSGISYPFNKLAYAIGDGTTPAGNTHIVCLGGAHNHIQPEEDVEATKMAVENMSPGNMDIKRLVFHNWCKDEFAKGAWFFAPPQLLSKSLDELRCRHGNVLFANSDWALGWRGFIDGAIEEGTRAAVTVIEELRPAPAVRSHL

SEQ ID NO: 125 - DNA, 1485 bp, synthetic construct
  misc_feature 1..1485: note = Variant of monoamine oxidase
  source 1..1485: mol_type = other DNA
atgaccagccgcgacggctatcagtggaccccggaaacgggtctgacccagggcgtaccgtccctgggtgtcatttcgccgccgactaacatcgaagataccgataaggacgggccttgggatgtcattgtcattgggggcgggtattgtgggctgaccgcaacccgtgatttaaccgtcgcagggttcaagacgctgctgctggaggcccgtgatcgtattggtggccgctcctggagcagtaatattgacggttacccgtatgagatgggtggcacttgggttcattggcatcaatctcacgtgtggcgtgaaatcacgcgttataaaatgcacaacgcgctgtctccatcatttaacttttcacgtggcgtgaatcacttccaactgcgtaccaatccgaccaccagtacgtacatgacgcacgaagcgctggatgaactgctgcgtagcgcattgcataaattcaccaatgtcgacggcactaatggccgtacagtgttgccgttcccacatgatatgttttatgtgccggaatttcgcaagtatgacgaaatgtcatattccgaacgcattgaccagatccgcgacgaactgtctttgaacgaacgctctagtttagaggctttcattttattatgtagcggtggcaccctggaaaactccagctttggtgaatttctgcattggtgggcaatgtcgggttacacgtatcagggctgtatggattgtttaatctcctataaatttaaggatggccagagtgcgttcgcgcgtcgcttctgggaagaagccgctggcactggccgtctgggctatgtctttggttgtccggtgcgttctgtggtgaacgaacgcgacgcagtacgtgttaccgcacgtgacggtcgcgaattcgcagcgaaacgtttggtttgcacgattccgctgaacgtattgagttctgttcattttagcccaccactgtccccgcaacgcatggccgctgcgaacattggccatgttaaccagtgcgtcaaagtgcatgcggaagtcagttgtccggatatgcgttcatggtcgggtatctcctatccgttcaacaaattagcctacgctatcggcgatggcacgaccccagcgggtaatacgcatattgtgtgccttgggggggcccataatcatatccagccggaagaggacgtggaagcaacgaagatggccgttgaaaacatgtcgcctgggaatatggatatcaaacgtctggtcttccacaactggtgcaaggatgaatttgccaaaggcgcgtggttcttcgcccctccacagctgctgtcaaagagcctggatgaactgcgctgccgtcacggtaatgtcctgtttgcaaactccgattgggccttaggttggcgtggttttatcgatggtgctatcgaggagggcacccgcgcagcggttactgtaattgaggaactgcgtcctgcgcctgcggtgcgttcccacctg

SEQ ID NO: 126 - protein, 495 aa, synthetic construct
  REGION 1..495: note = Variant of monoamine oxidase
MTSRDGYQWTPETGLTQGVPSLGVISPPTNIEDTDKDGPWDVIVIGGGYCGLTATRDLTVAGFKTLLLEARDRIGGRSWSSNIDGYPYEMGGTWVHWHQSHVWREITRYKMHNALSPSFNFSRGVNHFQLRTNPTTSTYMTHEALDELLRSALHKFTNVDGTNGRTVLPFPHDMFYVPEFRKYDEMSYSERIDQIRDELSLNERSSLEAFILLCSGGTLENSSFGEFLHWWAMSGYTYQGCMDCLISYKFKDGQSAFARRFWEEAAGTGRLGYVFGCPVRSVVNERDAVRVTARDGREFAAKRLVCTIPLNVLSSVHFSPPLSPQRMAAANIGHVNQCVKVHAEVSCPDMRSWSGISYPFNKLAYAIGDGTTPAGNTHIVCLGGAHNHIQPEEDVEATKMAVENMSPGNMDIKRLVFHNWCKDEFAKGAWFFAPPQLLSKSLDELRCRHGNVLFANSDWALGWRGFIDGAIEEGTRAAVTVIEELRPAPAVRSHL

SEQ ID NO: 127 - DNA, 1485 bp, synthetic construct
  misc_feature 1..1485: note = Variant of monoamine oxidase
  source 1..1485: mol_type = other DNA
atgaccagccgcgacggctatcagtggaccccggaaacgggtctgacccagggcgtaccgtccctgggtgtcatttcgccgccgactaacatcgaagataccgataaggacgggccttgggatgtcattgtcattgggggcgggtattgtgggctgaccgcaacccgtgatttaaccgtcgcagggttcaagacgctgctgctggaggcccgtgatcgtattggtggccgctcctggagcagtaatattgacggttacccgtatgagatgggtggcacttgggttcattggcatcaatctcacgtgtggcgtgaaatcacgcgttataaaatgcacaacgcgctgtctccatcatttaacttttcacgtggcgtgaatcacttccaactgcgtaccaatccgaccaccagtacgtacatgacgcacgaagcggaggatgaactgctgcgtagcgcattgcataaattcaccaatgtcgacggcactaatggccgtacagtgttgccgttcccacatgatgggttttatgtgccggaatttcgcaagtatgacgaaatgtcatattccgaacgcattgaccagatccgcgacgaactgtctttgaacgaacgctctagtttagaggctttcattttattatgtagcggtggcaccctggaaaactccagctttggtgaatttctgcattggtgggcaatgtcgggttacacgtatcagggctgtatggattgtttaatctcctataaatttaaggatggccagagtgcgttcgcgcgtcgcttctgggaagaagccgctggcactggccgtctgggctatgtctttggttgtccggtgcgttctgtggtgaacgaacgcgacgcagtacgtgttaccgcacgtgacggtcgcgaattcgcagcgaaacgtttggtttgcacgattccgctgaacgtattgagttctgttcattttagcccaccactgtccccgcaacgcatggccgctgcgaacattggccatgttaaccagtgcgtcaaagtgcatgcggaagtcagttgtccggatatgcgttcatggtcgggtatctcctatccgttcaacaaattagcctacgctatcggcgatggcacgaccccagcgggtaatacgcatattgtgtgccttgggggggcccataatcatatccagccggaagaggacgtggaagcaacgaagatggccgttgaaaacatgtcgcctgggaatatggatatcaaacgtctggtcttccacaactggtgcaaggatgaatttgccaaaggcgcgtggttcttcgcccctccacagctgctgtcaaagagcctggatgaactgcgctgccgtcacggtaatgtcctgtttgcaaactccgattgggccttaggttggcgtggttttatcgatggtgctatcgaggagggcacccgcgcagcggttactgtaattgaggaactgcgtcctgcgcctgcggtgcgttcccacctg

SEQ ID NO: 128 - protein, 495 aa, synthetic construct
  REGION 1..495: note = Variant of monoamine oxidase
MTSRDGYQWTPETGLTQGVPSLGVISPPTNIEDTDKDGPWDVIVIGGGYCGLTATRDLTVAGFKTLLLEARDRIGGRSWSSNIDGYPYEMGGTWVHWHQSHVWREITRYKMHNALSPSFNFSRGVNHFQLRTNPTTSTYMTHEAEDELLRSALHKFTNVDGTNGRTVLPFPHDGFYVPEFRKYDEMSYSERIDQIRDELSLNERSSLEAFILLCSGGTLENSSFGEFLHWWAMSGYTYQGCMDCLISYKFKDGQSAFARRFWEEAAGTGRLGYVFGCPVRSVVNERDAVRVTARDGREFAAKRLVCTIPLNVLSSVHFSPPLSPQRMAAANIGHVNQCVKVHAEVSCPDMRSWSGISYPFNKLAYAIGDGTTPAGNTHIVCLGGAHNHIQPEEDVEATKMAVENMSPGNMDIKRLVFHNWCKDEFAKGAWFFAPPQLLSKSLDELRCRHGNVLFANSDWALGWRGFIDGAIEEGTRAAVTVIEELRPAPAVRSHL

SEQ ID NO: 129 - DNA, 1485 bp, synthetic construct
  misc_feature 1..1485: note = Variant of monoamine oxidase
  source 1..1485: mol_type = other DNA
atgaccagccgcgacggctatcagtggaccccggaaacgggtctgacccagggcgtaccgtccctgggtgtcatttcgccgccgactaacatcgaagataccgataaggacgggccttgggatgtcattgtcattgggggcgggtattgtgggctgaccgcaacccgtgatttaaccgtcgcagggttcaagacgctgctgctggaggcccgtgatcgtattggtggccgctcctggagcagtaatattgacggttacccgtatgagatgggtggcacttgggttcattggcatcaatctcacgtgtggcgtgaaatcacgcgttataaaatgcacaacgcgctgtctccatcatttaacttttcacgtggcgtgaatcacttccaactgcgtaccaatccgaccaccagtacgtacatgacgcacgaagcggaggatgaactgctgcgtagcgcaacgcataaattcaccaatgtcgacggcactaatggccgtacagtgttgccgttcccacatgatatgttttatgtgccggaatttcgcaagtatgacgaaatgtcatattccgaacgcattgaccagatccgcgacgaactgtctttgaacgaacgctctagtttagaggctttcattttattatgtagcggtggcaccctggaaaactccagctttggtgaatttctgcattggtgggcaatgtcgggttacacgtatcagggctgtatggattgtttaatctcctataaatttaaggatggccagagtgcgttcgcgcgtcgcttctgggaagaagccgctggcactggccgtctgggctatgtctttggttgtccggtgcgttctgtggtgaacgaacgcgacgcagtacgtgttaccgcacgtgacggtcgcgaattcgcagcgaaacgtttggtttgcacgattccgctgaacgtattgagttctgttcattttagcccaccactgtccccgcaacgcatggccgctgcgaacattggccatgttaaccagtgcgtcaaagtgcatgcggaagtcagttgtccggatatgcgttcatggtcgggtatctcctatccgttcaacaaattagcctacgctatcggcgatggcacgaccccagcgggtaatacgcatattgtgtgccttgggggggcccataatcatatccagccggaagaggacgtggaagcaacgaagatggccgttgaaaacatgtcgcctgggaatatggatatcaaacgtctggtcttccacaactggtgcaaggatgaatttgccaaaggcgcgtggttcttcgcccctccacagctgctgtcaaagagcctggatgaactgcgctgccgtcacggtaatgtcctgtttgcaaactccgattgggccttaggttggcgtggttttatcgatggtgctatcgaggagggcacccgcgcagcggttactgtaattgaggaactgcgtcctgcgcctgcggtgcgttcccacctg

SEQ ID NO: 130 - protein, 495 aa, synthetic construct
  REGION 1..495: note = Variant of monoamine oxidase
MTSRDGYQWTPETGLTQGVPSLGVISPPTNIEDTDKDGPWDVIVIGGGYCGLTATRDLTVAGFKTLLLEARDRIGGRSWSSNIDGYPYEMGGTWVHWHQSHVWREITRYKMHNALSPSFNFSRGVNHFQLRTNPTTSTYMTHEAEDELLRSATHKFTNVDGTNGRTVLPFPHDMFYVPEFRKYDEMSYSERIDQIRDELSLNERSSLEAFILLCSGGTLENSSFGEFLHWWAMSGYTYQGCMDCLISYKFKDGQSAFARRFWEEAAGTGRLGYVFGCPVRSVVNERDAVRVTARDGREFAAKRLVCTIPLNVLSSVHFSPPLSPQRMAAANIGHVNQCVKVHAEVSCPDMRSWSGISYPFNKLAYAIGDGTTPAGNTHIVCLGGAHNHIQPEEDVEATKMAVENMSPGNMDIKRLVFHNWCKDEFAKGAWFFAPPQLLSKSLDELRCRHGNVLFANSDWALGWRGFIDGAIEEGTRAAVTVIEELRPAPAVRSHL

SEQ ID NO: 131 - DNA, 1485 bp, synthetic construct
  misc_feature 1..1485: note = Variant of monoamine oxidase
  source 1..1485: mol_type = other DNA
atgaccagccgcgacggctatcagtggaccccggaaacgggtctgacccagggcgtaccgtccctgggtgtcatttcgccgccgactaacatcgaagataccgataaggacgggccttgggatgtcattgtcattgggggcgggtattgtgggctgaccgcaacccgtgatttaaccgtcgcagggttcaagacgctgctgctggaggcccgtgatcgtattggtggccgctcctggagcagtaatattgacggttacccgtatgagatgggtggcacttgggttcattggcatcaatctcacgtgtggcgtgaaatcacgcgttataaaatgcacaacgcgctgtctccatcatttaacttttcacgtggcgtgaatcacttccaactgcgtaccaatccgaccaccagtacgtacatgacgcacgaagcggaggatgaactgctgcgtagcgcattgcataaattcaccaatgtcgacggcactaatggccgtacagtgttgccgttcccacatgatatgttttatgtgccggaatttcgcaagtatgacgaaatgtcatattccgaacgcattgaccagatccgcgacgaactgtctttgaacgaacgctctagtttagaggctttcattttattatgtagcggtggcaccctggaatgttccagctttggtgaatttctgcattggtgggcaatgtcgggttacacgtatcagggctgtatggattgtttaatctcctataaatttaaggatggccagagtgcgttcgcgcgtcgcttctgggaagaagccgctggcactggccgtctgggctatgtctttggttgtccggtgcgttctgtggtgaacgaacgcgacgcagtacgtgttaccgcacgtgacggtcgcgaattcgcagcgaaacgtttggtttgcacgattccgctgaacgtattgagttctgttcattttagcccaccactgtccccgcaacgcatggccgctgcgaacattggccatgttaaccagtgcgtcaaagtgcatgcggaagtcagttgtccggatatgcgttcatggtcgggtatctcctatccgttcaacaaattagcctacgctatcggcgatggcacgaccccagcgggtaatacgcatattgtgtgccttgggggggcccataatcatatccagccggaagaggacgtggaagcaacgaagatggccgttgaaaacatgtcgcctgggaatatggatatcaaacgtctggtcttccacaactggtgcaaggatgaatttgccaaaggcgcgtggttcttcgcccctccacagctgctgtcaaagagcctggatgaactgcgctgccgtcacggtaatgtcctgtttgcaaactccgattgggccttaggttggcgtggttttatcgatggtgctatcgaggagggcacccgcgcagcggttactgtaattgaggaactgcgtcctgcgcctgcggtgcgttcccacctg

SEQ ID NO: 132 - protein, 495 aa, synthetic construct
  REGION 1..495: note = Variant of monoamine oxidase
MTSRDGYQWTPETGLTQGVPSLGVISPPTNIEDTDKDGPWDVIVIGGGYCGLTATRDLTVAGFKTLLLEARDRIGGRSWSSNIDGYPYEMGGTWVHWHQSHVWREITRYKMHNALSPSFNFSRGVNHFQLRTNPTTSTYMTHEAEDELLRSALHKFTNVDGTNGRTVLPFPHDMFYVPEFRKYDEMSYSERIDQIRDELSLNERSSLEAFILLCSGGTLECSSFGEFLHWWAMSGYTYQGCMDCLISYKFKDGQSAFARRFWEEAAGTGRLGYVFGCPVRSVVNERDAVRVTARDGREFAAKRLVCTIPLNVLSSVHFSPPLSPQRMAAANIGHVNQCVKVHAEVSCPDMRSWSGISYPFNKLAYAIGDGTTPAGNTHIVCLGGAHNHIQPEEDVEATKMAVENMSPGNMDIKRLVFHNWCKDEFAKGAWFFAPPQLLSKSLDELRCRHGNVLFANSDWALGWRGFIDGAIEEGTRAAVTVIEELRPAPAVRSHL

SEQ ID NO: 133 - DNA, 1485 bp, synthetic construct
  misc_feature 1..1485: note = Variant of monoamine oxidase
  source 1..1485: mol_type = other DNA
atgaccagccgcgacggctatcagtggaccccggaaacgggtctgacccagggcgtaccgtccctgggtgtcatttcgccgccgactaacatcgaagataccgataaggacgggccttgggatgtcattgtcattgggggcgggtattgtgggctgaccgcaacccgtgatttaaccgtcgcagggttcaagacgctgctgctggaggcccgtgatcgtattggtggccgctcctggagcagtaatattgacggttacccgtatgagatgggtggcacttgggttcattggcatcaatctcacgtgtggcgtgaaatcacgcgttataaaatgcacaacgcgctgtctccatcatttaacttttcacgtggcgtgaatcacttccaactgcgtaccaatccgaccaccagtacgtacatgacgcacgaagcggaggatgaactgctgcgtagcgcattgcataaattcaccaatgtcgacggcactaatggccgtacagtgttgccgttcccacatgatatgttttataggccggaatttcgcaagtatgacgaaatgtcatattccgaacgcattgaccagatccgcgacgaactgtctttgaacgaacgctctagtttagaggctttcattttattatgtagcggtggcaccctggaaaactccagctttggtgaatttctgcattggtgggcaatgtcgggttacacgtatcagggctgtatggattgtttaatctcctataaatttaaggatggccagagtgcgttcgcgcgtcgcttctgggaagaagccgctggcactggccgtctgggctatgtctttggttgtccggtgcgttctgtggtgaacgaacgcgacgcagtacgtgttaccgcacgtgacggtcgcgaattcgcagcgaaacgtttggtttgcacgattccgctgaacgtattgagttctgttcattttagcccaccactgtccccgcaacgcatggccgctgcgaacattggccatgttaaccagtgcgtcaaagtgcatgcggaagtcagttgtccggatatgcgttcatggtcgggtatctcctatccgttcaacaaattagcctacgctatcggcgatggcacgaccccagcgggtaatacgcatattgtgtgccttgggggggcccataatcatatccagccggaagaggacgtggaagcaacgaagatggccgttgaaaacatgtcgcctgggaatatggatatcaaacgtctggtcttccacaactggtgcaaggatgaatttgccaaaggcgcgtggttcttcgcccctccacagctgctgtcaaagagcctggatgaactgcgctgccgtcacggtaatgtcctgtttgcaaactccgattgggccttaggttggcgtggttttatcgatggtgctatcgaggagggcacccgcgcagcggttactgtaattgaggaactgcgtcctgcgcctgcggtgcgttcccacctg

SEQ ID NO: 134 - protein, 495 aa, synthetic construct
  REGION 1..495: note = Variant of monoamine oxidase
MTSRDGYQWTPETGLTQGVPSLGVISPPTNIEDTDKDGPWDVIVIGGGYCGLTATRDLTVAGFKTLLLEARDRIGGRSWSSNIDGYPYEMGGTWVHWHQSHVWREITRYKMHNALSPSFNFSRGVNHFQLRTNPTTSTYMTHEAEDELLRSALHKFTNVDGTNGRTVLPFPHDMFYRPEFRKYDEMSYSERIDQIRDELSLNERSSLEAFILLCSGGTLENSSFGEFLHWWAMSGYTYQGCMDCLISYKFKDGQSAFARRFWEEAAGTGRLGYVFGCPVRSVVNERDAVRVTARDGREFAAKRLVCTIPLNVLSSVHFSPPLSPQRMAAANIGHVNQCVKVHAEVSCPDMRSWSGISYPFNKLAYAIGDGTTPAGNTHIVCLGGAHNHIQPEEDVEATKMAVENMSPGNMDIKRLVFHNWCKDEFAKGAWFFAPPQLLSKSLDELRCRHGNVLFANSDWALGWRGFIDGAIEEGTRAAVTVIEELRPAPAVRSHL

SEQ ID NO: 135 - DNA, 1485 bp, synthetic construct
  misc_feature 1..1485: note = Variant of monoamine oxidase
  source 1..1485: mol_type = other DNA
atgaccagccgcgacggctatcagtggaccccggaaacgggtctgacccagggcgtaccgtccctgggtgtcatttcgccgccgactaacatcgaagataccgataaggacgggccttgggatgtcattgtcattgggggcgggtattgtgggctgaccgcaacccgtgatttaaccgtcgcagggttcaagacgctgctgctggaggcccgtgatcgtattggtggccgctcctggagcagtaatattgacggttacccgtatgagatgggtggcacttgggttcattggcatcaatctcacgtgtggcgtgaaatcacgcgttataaaatgcacaacgcgctgtctccatcatttaacttttcacgtggcgtgaatcacttccaactgcgtaccaatccgaccaccagtacgtacatgacgcacgaagcggaggatgaactgctgcgtagcgcattgcataaattcaccaatgtcgacggcactaatggccgtacagtgttgccgttcccacatgatatgttttatgtgccggaatttcgcaagtatgacgaaatgtcatattccgaacgcattgaccagatccgcgacgatctgtctttgaacgaacgctctagtttagaggctttcattttattatgtagcggtggcaccctggaaaactccagctttggtgaatttctgcattggtgggcaatgtcgggttacacgtatcagggctgtatggattgtttaatctcctataaatttaaggatggccagagtgcgttcgcgcgtcgcttctgggaagaagccgctggcactggccgtctgggctatgtctttggttgtccggtgcgttctgtggtgaacgaacgcgacgcagtacgtgttaccgcacgtgacggtcgcgaattcgcagcgaaacgtttggtttgcacgattccgctgaacgtattgagttctgttcattttagcccaccactgtccccgcaacgcatggccgctgcgaacattggccatgttaaccagtgcgtcaaagtgcatgcggaagtcagttgtccggatatgcgttcatggtcgggtatctcctatccgttcaacaaattagcctacgctatcggcgatggcacgaccccagcgggtaatacgcatattgtgtgccttgggggggcccataatcatatccagccggaagaggacgtggaagcaacgaagatggccgttgaaaacatgtcgcctgggaatatggatatcaaacgtctggtcttccacaactggtgcaaggatgaatttgccaaaggcgcgtggttcttcgcccctccacagctgctgtcaaagagcctggatgaactgcgctgccgtcacggtaatgtcctgtttgcaaactccgattgggccttaggttggcgtggttttatcgatggtgctatcgaggagggcacccgcgcagcggttactgtaattgaggaactgcgtcctgcgcctgcggtgcgttcccacctg

SEQ ID NO: 136 - protein, 495 aa, synthetic construct
  REGION 1..495: note = Variant of monoamine oxidase
MTSRDGYQWTPETGLTQGVPSLGVISPPTNIEDTDKDGPWDVIVIGGGYCGLTATRDLTVAGFKTLLLEARDRIGGRSWSSNIDGYPYEMGGTWVHWHQSHVWREITRYKMHNALSPSFNFSRGVNHFQLRTNPTTSTYMTHEAEDELLRSALHKFTNVDGTNGRTVLPFPHDMFYVPEFRKYDEMSYSERIDQIRDDLSLNERSSLEAFILLCSGGTLENSSFGEFLHWWAMSGYTYQGCMDCLISYKFKDGQSAFARRFWEEAAGTGRLGYVFGCPVRSVVNERDAVRVTARDGREFAAKRLVCTIPLNVLSSVHFSPPLSPQRMAAANIGHVNQCVKVHAEVSCPDMRSWSGISYPFNKLAYAIGDGTTPAGNTHIVCLGGAHNHIQPEEDVEATKMAVENMSPGNMDIKRLVFHNWCKDEFAKGAWFFAPPQLLSKSLDELRCRHGNVLFANSDWALGWRGFIDGAIEEGTRAAVTVIEELRPAPAVRSHL

SEQ ID NO: 137 - DNA, 1485 bp, synthetic construct
  misc_feature 1..1485: note = Variant of monoamine oxidase
  source 1..1485: mol_type = other DNA
atgaccagccgcgacggctatcagtggaccccggaaacgggtctgacccagggcgtaccgtccctgggtgtcatttcgccgccgactaacatcgaagataccgataaggacgggccttgggatgtcattgtcattgggggcgggtattgtgggctgaccgcaacccgtgatttaaccgtcgcagggttcaagacgctgctgctggaggcccgtgatcgtattggtggccgctcctggagcagtaatattgacggttaccagtatgagatgggtggcacttgggttcattggcatcaatctcacgtgtggcgtgaaatcacgcgttataaaatgcacaacgcgctgtctccatcatttaacttttcacgtggcgtgaatcacttccaactgcgtaccaatccgaccaccagtacgtacatgacgcacgaagcggaggatgaactgctgcgtagcgcattgcataaattcaccaatgtcgacggcactaatggccgtacagtgttgccgttcccacatgatatgttttatgtgccggaatttcgcaagtatgactttatgtcatattccgaacgcattgaccagatccgcgacgaactgtctttgaacgaacgctctagtttagaggctttcattttattatgtagcggtggcaccctggaaaactccagctttggtgaatttctgcattggtgggcaatgtcgggttacacgtatcagggctgtatggattgtttaatctcctataaatttaaggatggccagagtgcgttcgcgcgtcgcttctgggaagaagccgctggcactggccgtctgggctatgtctttggttgtccggtgcgttctgtggtgaacgaacgcgacgcagtacgtgttaccgcacgtgacggtcgcgaattcgcagcgaaacgtttggtttgcacgattccgctgaacgtattgagttctgttcattttagcccaccactgtccccgcaacgcatggccgctgcgaacattggccatgttaaccagtgcgtcaaagtgcatgcggaagtcagttgtccggatatgcgttcatggtcgggtatctcctatccgttcaacaaattagcctacgctatcggcgatggcacgaccccagcgggtaatacgcatattgtgtgccttgggggggcccataatcatatccagccggaagaggacgtggaagcaacgaagatggccgttgaaaacatgtcgcctgggaatatggatatcaaacgtctggtcttccacaactggtgcaaggatgaatttgccaaaggcgcgtggttcttcgcccctccacagctgctgtcaaagagcctggatgaactgcgctgccgtcacggtaatgtcctgtttgcaaactccgattgggccttaggttggcgtggttttatcgatggtgctatcgaggagggcacccgcgcagcggttactgtaattgaggaactgcgtcctgcgcctgcggtgcgttcccacctg

SEQ ID NO: 138 - protein, 495 aa, synthetic construct
  REGION 1..495: note = Variant of monoamine oxidase
MTSRDGYQWTPETGLTQGVPSLGVISPPTNIEDTDKDGPWDVIVIGGGYCGLTATRDLTVAGFKTLLLEARDRIGGRSWSSNIDGYQYEMGGTWVHWHQSHVWREITRYKMHNALSPSFNFSRGVNHFQLRTNPTTSTYMTHEAEDELLRSALHKFTNVDGTNGRTVLPFPHDMFYVPEFRKYDFMSYSERIDQIRDELSLNERSSLEAFILLCSGGTLENSSFGEFLHWWAMSGYTYQGCMDCLISYKFKDGQSAFARRFWEEAAGTGRLGYVFGCPVRSVVNERDAVRVTARDGREFAAKRLVCTIPLNVLSSVHFSPPLSPQRMAAANIGHVNQCVKVHAEVSCPDMRSWSGISYPFNKLAYAIGDGTTPAGNTHIVCLGGAHNHIQPEEDVEATKMAVENMSPGNMDIKRLVFHNWCKDEFAKGAWFFAPPQLLSKSLDELRCRHGNVLFANSDWALGWRGFIDGAIEEGTRAAVTVIEELRPAPAVRSHL

SEQ ID NO: 139 - DNA, 1485 bp, synthetic construct
  misc_feature 1..1485: note = Variant of monoamine oxidase
  source 1..1485: mol_type = other DNA
atgaccagccgcgacggctatcagtggaccccggaaacgggtctgacccagggcgtaccgtccctgggtgtcatttcgccgccgactaacatcgaagataccgataaggacgggccttgggatgtcattgtcattgggggcgggtattgtgggctgaccgcaacccgtgatttaaccgtcgcagggttcaagacgctgctgctggaggcccgtgatcgtattggtggccgctcctggagcagtaatattgacggttacccgtatgagatgggtggcacttgggttcattggcatcaatctcacgtgtggcgtgaaatcacgcgttataaaatgcacaacgcgctgtctccatcatttaacttttcacgtggcgtgaatcacttccaactgcgtaccaatccgaccaccagtacgtacatgacgcacgaagcggaggatgaactgctgcgtagcgcattgcataaattcaccaatgtcgacggcactaatggccgtacagtgttgccgttcccacatgatatgttttatgtgccggaatttcgcaagtatgacgaaatgtcatattccgaacgcattgaccagatccgcgacgaactgtctttgaacgaacgctctagtttagaggctttcattttattatgtagcggtggcaccctggaaaactccagctttggtgaatttctgcattggtgggcaatggttggttacacgtatcagggctgtatggattgtttaatctcctataaatttaaggatggccagagtgcgttcgcgcgtcgcttctgggaagaagccgctggcactggccgtctgggctatgtctttggttgtccggtgcgttctgtggtgaacgaacgcgacgcagtacgtgttaccgcacgtgacggtcgcgaattcgcagcgaaacgtttggtttgcacgattccgctgaacgtattgagttctgttcattttagcccaccactgtccccgcaacgcatggccgctgcgaacattggccatgttaaccagtgcgtcaaagtgcatgcggaagtcagttgtccggatatgcgttcatggtcgggtatctcctatccgttcaacaaattagcctacgctatcggcgatggcacgaccccagcgggtaatacgcatattgtgtgccttgggggggcccataatcatatccagccggaagaggacgtggaagcaacgaagatggccgttgaaaacatgtcgcctgggaatatggatatcaaacgtctggtcttccacaactggtgcaaggatgaatttgccaaaggcgcgtggttcttcgcccctccacagctgctgtcaaagagcctggatgaactgcgctgccgtcacggtaatgtcctgtttgcaaactccgattgggccttaggttggcgtggttttatcgatggtgctatcgaggagggcacccgcgcagcggttactgtaattgaggaactgcgtcctgcgcctgcggtgcgttcccacctg

SEQ ID NO: 140 - protein, 495 aa, synthetic construct
  REGION 1..495: note = Variant of monoamine oxidase
MTSRDGYQWTPETGLTQGVPSLGVISPPTNIEDTDKDGPWDVIVIGGGYCGLTATRDLTVAGFKTLLLEARDRIGGRSWSSNIDGYPYEMGGTWVHWHQSHVWREITRYKMHNALSPSFNFSRGVNHFQLRTNPTTSTYMTHEAEDELLRSALHKFTNVDGTNGRTVLPFPHDMFYVPEFRKYDEMSYSERIDQIRDELSLNERSSLEAFILLCSGGTLENSSFGEFLHWWAMVGYTYQGCMDCLISYKFKDGQSAFARRFWEEAAGTGRLGYVFGCPVRSVVNERDAVRVTARDGREFAAKRLVCTIPLNVLSSVHFSPPLSPQRMAAANIGHVNQCVKVHAEVSCPDMRSWSGISYPFNKLAYAIGDGTTPAGNTHIVCLGGAHNHIQPEEDVEATKMAVENMSPGNMDIKRLVFHNWCKDEFAKGAWFFAPPQLLSKSLDELRCRHGNVLFANSDWALGWRGFIDGAIEEGTRAAVTVIEELRPAPAVRSHL

SEQ ID NO: 141 - DNA, 1485 bp, synthetic construct
  misc_feature 1..1485: note = Variant of monoamine oxidase
  source 1..1485: mol_type = other DNA
atgaccagccgcgacggctatcagtggaccccggaaacgggtctgacccagggcgtaccgtccctgggtgtcatttcgccgccgactaacatcgaagataccgataaggacgggccttgggatgtcattgtcattgggggcgggtattgtgggctgaccgcaacccgtgatttaaccgtcgcagggttcaagacgctgctgctggaggcccgtgatcgtattggtggccgctcctggagcagtaatattgacggttacccgtatgagatgggtggcacttgggttcattggcatcaatctcacgtgtggcgtgaaatcacgcgttataaaatgcacaacgcgctgtctccatcatttaacttttcacgtggcgtgaatcacttccaactgcgtaccaatccgaccaccagtacgtacatgacgcacgaagcggaggatgaactgctgcgtagcgcattgcataaattcaccaatgtcgacggcactaatggccgtacagtgttgccgttcccacatgatatgttttatgtgccggaatttcgcaagtatgacgaaatgtcatattccgaacgcattgaccagatccgcgacgaactgtctttgaacgaacgctctagtttagaggctttcattttattatgtagcggtggcaccctggaaaactccagctttggtgaatttctgcattggtgggcaatgtcgggttacacgtatcagggctgtatggattgtttaatctcctataaatttaaggatggccagagtgcgttcgcgcgtcgcttctgggaagaagccgctggcactggccgtctgggctatgtctttggttgtccggtgcgttctgtggtgaacgaacgcgacgcagtacgtgttaccgcacgtgacggtcgcgaattcgcagcgaaacgtttggtttgcacgattccgctgaacgtattgagttctgttcattttagcccaccactgtccccgcaacgcatggccgctgcgaacattggccatgttaaccagtgcgtcaaagtgcatgcggaagtcagttgtccggatatgcgttcatggtcgggtatctcctatccgttcaacaaattagcctacgctatcggcgatggcacgaccccagcgggtaatacgcatattgtgtgccttgggggggccgggaatcatatccagccggaagaggacgtggaagcaacgaagatggccgttgaaaacatgtcgcctgggaatatggatatcaaacgtctggtcttccacaactggtgcaaggatgaatttgccaaaggcgcgtggttcttcgcccctccacagctgctgtcaaagagcctggatgaactgcgctgccgtcacggtaatgtcctgtttgcaaactccgattgggccttaggttggcgtggttttatcgatggtgctatcgaggagggcacccgcgcagcggttactgtaattgaggaactgcgtcctgcgcctgcggtgcgttcccacctg

SEQ ID NO: 142 - protein, 495 aa, synthetic construct
  REGION 1..495: note = Variant of monoamine oxidase
MTSRDGYQWTPETGLTQGVPSLGVISPPTNIEDTDKDGPWDVIVIGGGYCGLTATRDLTVAGFKTLLLEARDRIGGRSWSSNIDGYPYEMGGTWVHWHQSHVWREITRYKMHNALSPSFNFSRGVNHFQLRTNPTTSTYMTHEAEDELLRSALHKFTNVDGTNGRTVLPFPHDMFYVPEFRKYDEMSYSERIDQIRDELSLNERSSLEAFILLCSGGTLENSSFGEFLHWWAMSGYTYQGCMDCLISYKFKDGQSAFARRFWEEAAGTGRLGYVFGCPVRSVVNERDAVRVTARDGREFAAKRLVCTIPLNVLSSVHFSPPLSPQRMAAANIGHVNQCVKVHAEVSCPDMRSWSGISYPFNKLAYAIGDGTTPAGNTHIVCLGGAGNHIQPEEDVEATKMAVENMSPGNMDIKRLVFHNWCKDEFAKGAWFFAPPQLLSKSLDELRCRHGNVLFANSDWALGWRGFIDGAIEEGTRAAVTVIEELRPAPAVRSHL

SEQ ID NO: 143 - DNA, 1485 bp, synthetic construct
  misc_feature 1..1485: note = Variant of monoamine oxidase
  source 1..1485: mol_type = other DNA
atgaccagccgcgacggctatcagtggaccccggaaacgggtctgacccagggcgtaccgtccctgggtgtcatttcgccgccgactaacatcgaagataccgataaggacgggccttgggatgtcattgtcattgggggcgggtattgtgggctgaccgcaacccgtgatttaaccgtcgcagggttcaagacgctgctgctggaggcccgtgatcgtattggtggccgctcctggagcagtaatattgacggttacccgtatgagatgggtggcacttgggttcattggcatcaatctcacgtgtggcgtgaaatcacgcgttataaaatgcacaacgcgctgtctccatcatttaacttttcacgtggcgtgaatcacttccaactgcgtaccaatccgaccaccagtacgtacatgacgcacgaagcggaggatgaactgctgcgtagcgcattgcataaattcaccaatgtcgacggcactaatggccgtacagtgttgccgttcccacatgatatgttttatgtgccggaatttcgcaagtatgacgaaatgtcatattccgaacgcattgaccagatccgcgacgaactgtctttgaacgaacgctctagtttagaggctttcattttattatgtagcggtggcaccctggaaaactccagctttggtgaatttctgcattggtgggcaatgtcgggttacacgtatcagggctgtatggattgtttaatctcctataaatttaaggatggccagagtgcgttcgcgcgtcgcttctgggaagaagccgctggcactggccgtctgggctatgtctttggttgtccggtgcgttctgtggtgaacgaacgcgacgcagtacgtgttaccgcacgtgacggtcgcgaattcgcagcgaaacgtttggtttgcacgattccgctgaacgtattgagttctgttcattttagcccaccactgtccccgcaacgcatggccgctgcgaacattggccatgttaaccagtgcgtcaaagtgcatgcggaagtcagttgtccggatatgcgttcatggtcgggtatctcctatccgttcaacaaattagcctacgctatcggcgatggcacgaccccagcgggtaatacgcatattgtgtgccttgggggggcccataatcatatccagccggaagaggacgtggaagcaacgaagatggccgttgaaaacatgtcgcctgggaatatggatatccggcgtctggtcttccacaactggtgcaaggatgaatttgccaaaggcgcgtggttcttcgcccctccacagctgctgtcaaagagcctggatgaactgcgctgccgtcacggtaatgtcctgtttgcaaactccgattgggccttaggttggcgtggttttatcgatggtgctatcgaggagggcacccgcgcagcggttactgtaattgaggaactgcgtcctgcgcctgcggtgcgttcccacctg

SEQ ID NO: 144 - protein, 495 aa, synthetic construct
  REGION 1..495: note = Variant of monoamine oxidase
MTSRDGYQWTPETGLTQGVPSLGVISPPTNIEDTDKDGPWDVIVIGGGYCGLTATRDLTVAGFKTLLLEARDRIGGRSWSSNIDGYPYEMGGTWVHWHQSHVWREITRYKMHNALSPSFNFSRGVNHFQLRTNPTTSTYMTHEAEDELLRSALHKFTNVDGTNGRTVLPFPHDMFYVPEFRKYDEMSYSERIDQIRDELSLNERSSLEAFILLCSGGTLENSSFGEFLHWWAMSGYTYQGCMDCLISYKFKDGQSAFARRFWEEAAGTGRLGYVFGCPVRSVVNERDAVRVTARDGREFAAKRLVCTIPLNVLSSVHFSPPLSPQRMAAANIGHVNQCVKVHAEVSCPDMRSWSGISYPFNKLAYAIGDGTTPAGNTHIVCLGGAHNHIQPEEDVEATKMAVENMSPGNMDIRRLVFHNWCKDEFAKGAWFFAPPQLLSKSLDELRCRHGNVLFANSDWALGWRGFIDGAIEEGTRAAVTVIEELRPAPAVRSHL

SEQ ID NO: 145 - DNA, 1485 bp, synthetic construct
  misc_feature 1..1485: note = Variant of monoamine oxidase
  source 1..1485: mol_type = other DNA
atgaccagccgcgacggctatcagtggaccccggaaacgggtctgacccagggcgtaccgtccctgggtgtcatttcgccgccgactaacatcggggataccgataaggacgggccttgggatgtcattgtcattgggggcgggtattgtgggctgaccgcaacccgtgatttaaccgtcgcagggttcaagaccctgctgctggaggcccgtgatcgtattggtggccgctcctggagcagtaatattgacggttacccgtatgagatgggtggcacttgggttcattggcatcaatctcacgtgtggcgtgaaatcacgcgttataaaatgcacaacgcgctgtctccatcatttaacttttcacgtggcgtgaatcacttccaactgcgtaccaatccgactaccagtacgtacatgacgcacgaagcggaggatgaactgctgcgtagcgcattgcataaattcaccaatgtcgacggcactaatggccgtacagtgttgccgttcccacatgatatgttttatgtgccggaatttcgcaagtatgacgaaatgtcatattccgaacgcattgaccagatccgcgacgaactgtctttgaacgaacgctctagtttagaggctttcattttattatgtagcggtggcaccctggaaaactccagctttggtgaatttctgcattggtgggcaatgtcgggttacacgtatcagggctgtatggattgtttaatctcctataaatttaaggatggccagagtgcgttcgcgcgtcgcttctgggaagaagccgctggcactggccgtctgggctatgtctttggttgtccggtgcgttctgtggtggacgaacgcgacgcagtacgtgttaccgcacgtgacggtcgcgaattcgcagcgaaacgtttggtttgcacgattccgctgaacgtattgagttctgttcattttagcccaccactgtccccgcaacgcatggccgctgcgaacattggccatgttaaccagtgcgtcaaagtgcatgcggaagtcagttgtccggatatgcgttcatggtcgggtatctcctatccgttcaacaaattagcctacgctatcggcgatggcacgaccccagcgggtaatacgcatattgtgtgccttgggggggcgcataatcatatccagccggaagaggacgtggaagcaacgaagatggccgttgaaaacatgtcgcctgggaatatggatatcaaacgtctggtcttccacaactggtgcaaggatgaatttgccaaaggcgcgtggttcttcgcccctccacagctgctgtcaaagagcctggatgaactgcgctgccgtcacggtaatgtcctgtttgcaaactccgattgggccttaggttggcgtggttttatcgatggtgctatcgaggagggcacccgcgcagcggttactgtaattgaggaactgcgtcctgcgcctgcggtgcgttcccacctg

SEQ ID NO: 146 - protein, 495 aa, synthetic construct
  REGION 1..495: note = Variant of monoamine oxidase
MTSRDGYQWTPETGLTQGVPSLGVISPPTNIGDTDKDGPWDVIVIGGGYCGLTATRDLTVAGFKTLLLEARDRIGGRSWSSNIDGYPYEMGGTWVHWHQSHVWREITRYKMHNALSPSFNFSRGVNHFQLRTNPTTSTYMTHEAEDELLRSALHKFTNVDGTNGRTVLPFPHDMFYVPEFRKYDEMSYSERIDQIRDELSLNERSSLEAFILLCSGGTLENSSFGEFLHWWAMSGYTYQGCMDCLISYKFKDGQSAFARRFWEEAAGTGRLGYVFGCPVRSVVDERDAVRVTARDGREFAAKRLVCTIPLNVLSSVHFSPPLSPQRMAAANIGHVNQCVKVHAEVSCPDMRSWSGISYPFNKLAYAIGDGTTPAGNTHIVCLGGAHNHIQPEEDVEATKMAVENMSPGNMDIKRLVFHNWCKDEFAKGAWFFAPPQLLSKSLDELRCRHGNVLFANSDWALGWRGFIDGAIEEGTRAAVTVIEELRPAPAVRSHL

SEQ ID NO: 147 - DNA, 1485 bp, synthetic construct
  misc_feature 1..1485: note = Variant of monoamine oxidase
  source 1..1485: mol_type = other DNA
atgaccagccgcgacggctatcagtggaccccggaaacgggtctgacccagggcgtaccgtccctgggtgtcatttcgccgccgactaacatcgaagataccgataaggacgggccttgggatgtcattgtcattgggggcgggtattgtgggctgaccgcaacccgtgatttaaccgtcgcagggttcaagacgctgctgctggaggcccgtgatcgtattggtggccgctcctggagcagtaatattgacggttacccgtatgagatgggtggcacttgggttcattggcatcaatctcacgtgtggcgtgaaatcacgcgttataaaatgcacaacgcgctgtctccatcatttaacttttcacgtggcgtgaatcacttccaactgcgtaccaatccgaccaccagtacgtacatgacgcacgaagcggaggatgaactgctgcgtagcgcattgcataaattcaccaatgtcgacggcactaatggccgtacagtgttgccgttcccacatgatatgttttatgtgccggaatttcgcaagtatgacgaaatgtcatattccgaacgcattgaccagatccgcgacgaactgtctttgaacgaacgctctagtttagaggctttcattttattatgtagcggtggcaccctggaaaactccagctttggtgaatttctgcattggtgggcaatgtcgggttacacgtatcagggctgtatggattgtttaatctcctataaatttaaggatggccagagtgcgttcgcgcgtcgcttctgggaagaagccgctggcactggccgtctgggctatgtctttggttgtccggtgcgttctgtggtgaacgaacgcgacgcagtacgtgttaccgcacgtgacggtcgcgaattcgcagcgaaacgtttggtttgcacgattccgctgaacgtattgagttctgttcattttagcccaccactgtccccgcaacgcatggccgctgcgaacattggccatgttaaccagtgcgtcaaagtgcatgcggaagtcagttgtccggatatgcgttcatggtcgggtatctcctatccgttcaacaaattagcctacgctatcggcgatggcacgaccccagcgggtaatacgcatattgtgtgccttgggggggcccataatcatatccagccggaaggggacgtggaagcaacgaagatggccgttgaaaacatgtcgcctgggaatatggatatcaaacgtctggtcttccacaactggtgcaaggatgaatttgccaaaggcgcgtggttcttcgcccctccacagctgctgtcaaagagcctggatgaactgcgctgccgtcacggtaatgtcctgtttgcaaactccgattgggccttaggttggcgtggttttatcgatggtgctatcgaggagggcacccgcgcagcggttactgtaattgaggaactgcgtcctgcgcctgcggtgcgttcccacctg

SEQ ID NO: 148 - protein, 495 aa, synthetic construct
  REGION 1..495: note = Variant of monoamine oxidase
MTSRDGYQWTPETGLTQGVPSLGVISPPTNIEDTDKDGPWDVIVIGGGYCGLTATRDLTVAGFKTLLLEARDRIGGRSWSSNIDGYPYEMGGTWVHWHQSHVWREITRYKMHNALSPSFNFSRGVNHFQLRTNPTTSTYMTHEAEDELLRSALHKFTNVDGTNGRTVLPFPHDMFYVPEFRKYDEMSYSERIDQIRDELSLNERSSLEAFILLCSGGTLENSSFGEFLHWWAMSGYTYQGCMDCLISYKFKDGQSAFARRFWEEAAGTGRLGYVFGCPVRSVVNERDAVRVTARDGREFAAKRLVCTIPLNVLSSVHFSPPLSPQRMAAANIGHVNQCVKVHAEVSCPDMRSWSGISYPFNKLAYAIGDGTTPAGNTHIVCLGGAHNHIQPEGDVEATKMAVENMSPGNMDIKRLVFHNWCKDEFAKGAWFFAPPQLLSKSLDELRCRHGNVLFANSDWALGWRGFIDGAIEEGTRAAVTVIEELRPAPAVRSHL

SEQ ID NO: 149 - DNA, 1485 bp, synthetic construct
  misc_feature 1..1485: note = Variant of monoamine oxidase
  source 1..1485: mol_type = other DNA
atgaccagccgcgacggctatcagtggaccccggaaacgggtctgacccagggcgtaccgtccctgggtgtcatttcgccgccgactaacatcgaagataccgataaggacgggccttgggatgtcattgtcattgggggcgggtattgtgggctgaccgcaacccgtgatttaaccgtcgcagggttcaagacgctgctgctggaggcccgtgatcgtattggtggccgctcctggagcagtaatattgacggttacccgtatgagatgggtggcacttgggttcattggcatcaatctcacgtgtggcgtgaaatcacgcgttataaaatgcacaacgcgctgtctccatcatttaacttttcacgtggcgtgaatcacttccaactgcgtaccaatccgaccaccagtacgtacatgacgcacgaagcggaggatgaactgctgcgtagcgcattgcataaattcaccaatgtcgacggcactaatggccgtacagtgttgccgttcccacatgatatgttttatgtgccggaatttcgcaagtatgacgaaatgtcatattccgaacgcattgaccagatccgcgacgaactgtctttgaacgaacgctctagtttagaggctttcattttattatgtagcggtggcaccctggaaaactccagctttggtgaatttctgcattggtgggcaatgtcgggttacacgtatcagggctgtatggattgtttaatctcctataaatttaaggatggccagagtgcgttcgcgcgtcgcttctgggaagaagccgctggcactggccgtctgggctatgtctttggttgtccggtgcgttctgtggtgaacgaacgcgacgcagtacgtgttaccgcacgtgacggtcgcgaattcgcagcgaaacgtttggtttgcacgattccgctgaacgtattgagttctgttcattttagcccaccactgtccccgcaacgcatggccgctgcgaacattggccatgttaaccagtgcgtcaaagtgcatgcggaagtcagttgtccggatatgcgttcatggtcgggtatctcctatccgttcaacaaattagcctacgctatcggcgatggcacgaccccagcgggtaatacgcatattgtggcacttgggggggcccataatcatatccagccggaagaggacgtggaagcaacgaagatggccgttgaaaacatgtcgcctgggaatatggatatcaaacgtctggtcttccacaactggtgcaaggatgaatttgccaaaggcgcgtggttcttcgcccctccacagctgctgtcaaagagcctggatgaactgcgctgccgtcacggtaatgtcctgtttgcaaactccgattgggccttaggttggcgtggttttatcgatggtgctatcgaggagggcacccgcgcagcggttactgtaattgaggaactgcgtcctgcgcctgcggtgcgttcccacctg

SEQ ID NO: 150 - protein, 495 aa, synthetic construct
  REGION 1..495: note = Variant of monoamine oxidase
MTSRDGYQWTPETGLTQGVPSLGVISPPTNIEDTDKDGPWDVIVIGGGYCGLTATRDLTVAGFKTLLLEARDRIGGRSWSSNIDGYPYEMGGTWVHWHQSHVWREITRYKMHNALSPSFNFSRGVNHFQLRTNPTTSTYMTHEAEDELLRSALHKFTNVDGTNGRTVLPFPHDMFYVPEFRKYDEMSYSERIDQIRDELSLNERSSLEAFILLCSGGTLENSSFGEFLHWWAMSGYTYQGCMDCLISYKFKDGQSAFARRFWEEAAGTGRLGYVFGCPVRSVVNERDAVRVTARDGREFAAKRLVCTIPLNVLSSVHFSPPLSPQRMAAANIGHVNQCVKVHAEVSCPDMRSWSGISYPFNKLAYAIGDGTTPAGNTHIVALGGAHNHIQPEEDVEATKMAVENMSPGNMDIKRLVFHNWCKDEFAKGAWFFAPPQLLSKSLDELRCRHGNVLFANSDWALGWRGFIDGAIEEGTRAAVTVIEELRPAPAVRSHL

SEQ ID NO: 151 - DNA, 1485 bp, synthetic construct
  misc_feature 1..1485: note = Variant of monoamine oxidase
  source 1..1485: mol_type = other DNA
atgaccagccgcgacggctatcagtggaccccggaaacgggtctgacccagggcgtaccgtccctgggtgtcatttcgccgccgactaacatcgaagataccgataaggacgggccttgggatgtcattgtcattgggggcgggtattgtgggctgaccgcaacccgtgatttaaccgtcgcagggttcaagacgctgctgctggaggcccgtgatcgtattggtggccgctcctggagcagtaatattgacggttacccgtatgagatgggtggcacttgggttcattggcatcaatctcacgtgtggcgtgaaatcacgcgttataaaatgcacaacgcgctgtctccatcatttaacttttcacgtggcgtgaatcacttccaactgcgtaccaatccgaccaccagtacgtacatgacgcacgaagcggaggatgaactgctgcgtagcgcattgcataaattcaccaatgtcgacggcactaatggccgtacagtgttgccgttcccacatgatatgttttatgtgccggaatttcgcaagtatgacgaaatgtcatattccgaacgcattgaccagatccgcgacgaactgtctttgaacgaacgctctagtttagaggctttcattttattatgtagcggtggcaccctggaaaactccagctttggtgaatttctgcattggtgggcaatgtcgggttacacgtatcagggctgtatggattgtttaatctcctataaatttaagttgggccagagtgcgttcgcgcgtcgcttctgggaagaagccgctggcactggccgtctgggctatgtctttggttgtccggtgcgttctgtggtgaacgaacgcgacgcagtacgtgttaccgcacgtgacggtcgcgaattcgcagcgaaacgtttggtttgcacgattccgctgaacgtattgagttctgttcattttagcccaccactgtccccgcaacgcatggccgctgcgaacattggccatgttaaccagtgcgtcaaagtgcatgcggaagtcagttgtccggatatgcgttcatggtcgggtatctcctatccgttcaacaaattagcctacgctatcggcgatggcacgaccccagcgggtaatacgcatattgtgtgccttgggggggcccataatcatatccagccggaagaggacgtggaagcaacgaagatggccgttgaaaacatgtcgcctgggaatatggatatcaaacgtctggtcttccacaactggtgcaaggatgaatttgccaaaggcgcgtggttcttcgcccctccacagctgctgtcaaagagcctggatgaactgcgctgccgtcacggtaatgtcctgtttgcaaactccgattgggccttaggttggcgtggttttatcgatggtgctatcgaggagggcacccgcgcagcggttactgtaattgaggaactgcgtcctgcgcctgcggtgcgttcccacctg

SEQ ID NO: 152 - protein, 495 aa, synthetic construct
  REGION 1..495: note = Variant of monoamine oxidase
MTSRDGYQWTPETGLTQGVPSLGVISPPTNIEDTDKDGPWDVIVIGGGYCGLTATRDLTVAGFKTLLLEARDRIGGRSWSSNIDGYPYEMGGTWVHWHQSHVWREITRYKMHNALSPSFNFSRGVNHFQLRTNPTTSTYMTHEAEDELLRSALHKFTNVDGTNGRTVLPFPHDMFYVPEFRKYDEMSYSERIDQIRDELSLNERSSLEAFILLCSGGTLENSSFGEFLHWWAMSGYTYQGCMDCLISYKFKLGQSAFARRFWEEAAGTGRLGYVFGCPVRSVVNERDAVRVTARDGREFAAKRLVCTIPLNVLSSVHFSPPLSPQRMAAANIGHVNQCVKVHAEVSCPDMRSWSGISYPFNKLAYAIGDGTTPAGNTHIVCLGGAHNHIQPEEDVEATKMAVENMSPGNMDIKRLVFHNWCKDEFAKGAWFFAPPQLLSKSLDELRCRHGNVLFANSDWALGWRGFIDGAIEEGTRAAVTVIEELRPAPAVRSHL

SEQ ID NO: 153 - DNA, 1485 bp, synthetic construct
  misc_feature 1..1485: note = Variant of monoamine oxidase
  source 1..1485: mol_type = other DNA
atgaccagccgcgacggctatcagtggaccccggaaacgggtctgacccagggcgtaccgtccctgggtgtcatttcgccgccgactaacatcgaagataccgataaggacgggccttgggatgtcattgtcattgggggcgggtattgtgggctgaccgcaacccgtgatttaaccgtcgcagggttcaagacgctgctgctggaggcccgtgatcgtattggtggccgctcctggagcagtaatattgacggttacccgtatgagatgggtggcacttgggttcattggcatcaatctcacgtgtggcgtgaaatcacgcgttataaaatgcacaacgcgctgtctccatcatttaacttttcacgtggcgtgaatcacttccaactgcgtaccaatccgaccaccagtacgtacatgacgcacgaagcggaggatgaactgctgcgtagcgcattgcataaattcaccaatgtcgacggcactaatggccgtacatgtttgccgttcccacatgatatgttttatgtgccggaatttcgcaagtatgacgaaatgtcatattccgaacgcattgaccagatccgcgacgaactgtctttgaacgaacgctctagtttagaggctttcattttattatgtagcggtggcaccctggaaaactccagctttggtgaatttctgcattggtgggcaatgtcgggttacacgtatcagggctgtatggattgtttaatctcctataaatttaaggatggccagagtgcgttcgcgcgtcgcttctgggaagaagccgctggcactggccgtctgggctatgtctttggttgtccggtgcgttctgtggtgaacgaacgcgacgcagtacgtgttaccgcacgtgacggtcgcgaattcgcagcgaaacgtttggtttgcacgattccgctgaacgtattgagttctgttcattttagcccaccactgtccccgcaacgcatggccgctgcgaacattggccatgttaaccagtgcgtcaaagtgcatgcggaagtcagttgtccggatatgcgttcatggtcgggtatctcctatccgttcaacaaattagcctacgctatcggcgatggcacgaccccagcgggtaatacgcatattgtgtgccttgggggggcccataatcatatccagccggaagaggacgtggaagcaacgaagatggccgttgaaaacatgtcgcctgggaatatggatatcaaacgtctggtcttccacaactggtgcaaggatgaatttgccaaaggcgcgtggttcttcgcccctccacagctgctgtcaaagagcctggatgaactgcgctgccgtcacggtaatgtcctgtttgcaaactccgattgggccttaggttggcgtggttttatcgatggtgctatcgaggagggcacccgcgcagcggttactgtaattgaggaactgcgtcctgcgcctgcggtgcgttcccacctg

SEQ ID NO: 154 - protein, 495 aa, synthetic construct
  REGION 1..495: note = Variant of monoamine oxidase
MTSRDGYQWTPETGLTQGVPSLGVISPPTNIEDTDKDGPWDVIVIGGGYCGLTATRDLTVAGFKTLLLEARDRIGGRSWSSNIDGYPYEMGGTWVHWHQSHVWREITRYKMHNALSPSFNFSRGVNHFQLRTNPTTSTYMTHEAEDELLRSALHKFTNVDGTNGRTCLPFPHDMFYVPEFRKYDEMSYSERIDQIRDELSLNERSSLEAFILLCSGGTLENSSFGEFLHWWAMSGYTYQGCMDCLISYKFKDGQSAFARRFWEEAAGTGRLGYVFGCPVRSVVNERDAVRVTARDGREFAAKRLVCTIPLNVLSSVHFSPPLSPQRMAAANIGHVNQCVKVHAEVSCPDMRSWSGISYPFNKLAYAIGDGTTPAGNTHIVCLGGAHNHIQPEEDVEATKMAVENMSPGNMDIKRLVFHNWCKDEFAKGAWFFAPPQLLSKSLDELRCRHGNVLFANSDWALGWRGFIDGAIEEGTRAAVTVIEELRPAPAVRSHL

SEQ ID NO: 155 - DNA, 1485 bp, synthetic construct
  misc_feature 1..1485: note = Variant of monoamine oxidase
  source 1..1485: mol_type = other DNA
atgaccagccgcgacggctatcagtggaccccggaaacgggtctgacccagggcgtaccgtccctgggtgtcatttcgccgccgactaacatcgaagataccgataaggacgggccttgggatgtcattgtcattgggggcgggtattgtgggctgaccgcaacccgtgatttaaccgtcgcagggttcaagacgctgctgctggaggcccgtgatcgtattggtggccgctcctggagcagtaatattgacggttacccgtatgagatgggtggcacttgggttcattggcatcaatctcacgtgtggcgtgaaatcacgcgttataaaatgcacaacgcgctgtctccatcatttaacttttcacgtggcgtgaatcacttccaactgcgtaccaatccgaccaccagtacgtacatgacgcacgaagcggaggatgaactgctgcgtagcgcattgcataaattcaccaatgtcgacggcactaatggccgtacagtgttgccgttcccacatgatatgttttatgtgccggaatttcgcaagtatgacgaaatgtcatattccgaacgcattgaccagatccgcgacgaactgtctttgaacgaacgctctagtttagaggctttcattttattatgtagcggtggcaccctggaaaactccagctttggtgaatttctgcattggtgggcaatgtcgggttacacgtatcagggctgtatggattgtttaatctcctataaatttaaggagggccagagtgcgttcgcgcgtcgcttctgggaagaagccgctggcactggccgtctgggctatgtctttggttgtccggtgcgttctgtggtgaacgaacgcgacgcagtacgtgttaccgcacgtgacggtcgcgaattcgcagcgaaacgtttggtttgcacgattccgctgaacgtattgagttctgttcattttagcccaccactgtccccgcaacgcatggccgctgcgaacattggccatgttaaccagtgcgtcaaagtgcatgcggaagtcagttgtccggatatgcgttcatggtcgggtatctcctatccgttcaacaaattagcctacgctatcggcgatggcacgaccccagcgggtaatacgcatattgtgtgccttgggggggcccataatcatatccagccggaagaggacgtggaagcaacgaagatggccgttgaaaacatgtcgcctgggaatatggatatcaaacgtctggtcttccacaactggtgcaaggatgaatttgccaaaggcgcgtggttcttcgcccctccacagctgctgtcaaagagcctggatgaactgcgctgccgtcacggtaatgtcctgtttgcaaactccgattgggccttaggttggcgtggttttatcgatggtgctatcgaggagggcacccgcgcagcggttactgtaattgaggaactgcgtcctgcgcctgcggtgcgttcccacctg

SEQ ID NO: 156 - protein, 495 aa, synthetic construct
  REGION 1..495: note = Variant of monoamine oxidase
MTSRDGYQWTPETGLTQGVPSLGVISPPTNIEDTDKDGPWDVIVIGGGYCGLTATRDLTVAGFKTLLLEARDRIGGRSWSSNIDGYPYEMGGTWVHWHQSHVWREITRYKMHNALSPSFNFSRGVNHFQLRTNPTTSTYMTHEAEDELLRSALHKFTNVDGTNGRTVLPFPHDMFYVPEFRKYDEMSYSERIDQIRDELSLNERSSLEAFILLCSGGTLENSSFGEFLHWWAMSGYTYQGCMDCLISYKFKEGQSAFARRFWEEAAGTGRLGYVFGCPVRSVVNERDAVRVTARDGREFAAKRLVCTIPLNVLSSVHFSPPLSPQRMAAANIGHVNQCVKVHAEVSCPDMRSWSGISYPFNKLAYAIGDGTTPAGNTHIVCLGGAHNHIQPEEDVEATKMAVENMSPGNMDIKRLVFHNWCKDEFAKGAWFFAPPQLLSKSLDELRCRHGNVLFANSDWALGWRGFIDGAIEEGTRAAVTVIEELRPAPAVRSHL

SEQ ID NO: 157 - DNA, 1485 bp, synthetic construct
  misc_feature 1..1485: note = Variant of monoamine oxidase
  source 1..1485: mol_type = other DNA
atgaccagccgcgacggctatcagtggaccccggaaacgggtctgacccagggcgtaccgtccctgggtgtcatttcgccgccgactaacatcgaagataccgataaggacgggccttgggatgtcattgtcattgggggggggtattgtgggctgaccgcaacccgtgatttaaccgtcgcagggttcaagacgctgctgctggaggcccgtgatcgtattggtggccgctcctggagcagtaatattgacggttacccgtatgagatgggtggcacttgggttcattggcatcaatctcacgtgtggcgtgaaatcacgcgttataaaatgcacaacgcgctgtctccatcatttaacttttcacgtggcgtgaatcacttccaactgcgtaccaatccgaccaccagtacgtacatgacgcacgaagcggaggatgaactgctgcgtagcgcattgcataaattcaccaatgtcgacggcactaatggccgtacagtgttgccgttcccacatgatatgttttatgtgccggaatttcgcaagtatgacgaaatgtcatattccgaacgcattgaccagatccgcgacgaactgtctttgaacgaacgctctagtttagaggctttcattttattatgtagcggtggcaccctggaaaactccagctttggtgaatttctgcattggtgggcaatgtcgggttacacgtatcagggctgtatggattgtttaatctcctataaatttaaggatggccagagtgcgttcgcgcgtcgcttctgggaagaagccgcaggcactggccgtctgggctatgtctttggttgtccggtgcgttctgtggtgaacgaacgcgacgcagtacgtgttaccgcacgtgacggtcgcgaattcgcagcgaaacgtttggtttgcacgattccgctgaacgtattgagttctgttcattttagcccaccactgtccccgcaacgcatggccgctgcgaacattggccatgttaaccagtgcgtcaaagtgcatgcggaagtcagttgtccggatatgcgttcatggtcgggtatctcctatccgttcaacaaattagcctacgctatcggcgatggcacgaccccagcgggtaatacgcatattgtgtgccttgggggggcccataatcatatccagccggaagaggacgtggaagcaacgaagatggccgttgaaaacatgtcgcctgggaatatggatatcaaacgtctggtcttccacaactggtgcaaggatgaatttgccaaaggcgcgtggttcttcgcccctccacagctgctgtcaaagagcctggatgaactgcgcgcacgtcacggtaatgtcctgtttgcaaactccgattgggccttaggttggcgtggttttatcgatggtgctatcgaggagggcacccgcgcagcggttactgtaattgaggaactgcgtcctgcgcctgcggtgcgttcccacctg

SEQ ID NO: 158 - protein, 495 aa, synthetic construct
  REGION 1..495: note = Variant of monoamine oxidase
MTSRDGYQWTPETGLTQGVPSLGVISPPTNIEDTDKDGPWDVIVIGGGYCGLTATRDLTVAGFKTLLLEARDRIGGRSWSSNIDGYPYEMGGTWVHWHQSHVWREITRYKMHNALSPSFNFSRGVNHFQLRTNPTTSTYMTHEAEDELLRSALHKFTNVDGTNGRTVLPFPHDMFYVPEFRKYDEMSYSERIDQIRDELSLNERSSLEAFILLCSGGTLENSSFGEFLHWWAMSGYTYQGCMDCLISYKFKDGQSAFARRFWEEAAGTGRLGYVFGCPVRSVVNERDAVRVTARDGREFAAKRLVCTIPLNVLSSVHFSPPLSPQRMAAANIGHVNQCVKVHAEVSCPDMRSWSGISYPFNKLAYAIGDGTTPAGNTHIVCLGGAHNHIQPEEDVEATKMAVENMSPGNMDIKRLVFHNWCKDEFAKGAWFFAPPQLLSKSLDELRARHGNVLFANSDWALGWRGFIDGAIEEGTRAAVTVIEELRPAPAVRSHL

SEQ ID NO: 159 - DNA, 1485 bp, synthetic construct
  misc_feature 1..1485: note = Variant of monoamine oxidase
  source 1..1485: mol_type = other DNA
atgaccagccgcgacggctatcagtggaccccggaaacgggtctgacccagggcgtaccgtccctgggtgtcatttcgccgccgactaacatcgaagataccgataaggacgggccttgggatgtcattgtcattgggggcgggtattgtgggctgaccgcaacccgtgatttaaccgtcgcagggttcaagacgctgctgctggaggcccgtgatcgtattggtggccgctcctggagcagtaatattgacggttacccgtatgagatgggtggcacttgggttcattggcatcaatctcacgtgtggcgtgaaatcacgcgttataaaatgcacaacgcgctgtctccatcatttaacttttcacgtggcgtgaatcacttccaactgcgtaccaatccgaccaccagtacgtacatgacgcacgaagcggaggatgaactgctgcgtagcgcattgcataaattcaccaatgtcgacggcactaatggccgtacagtgttgccgttcccacatgatatgttttatgtgccggaatttcgcaagtatgacgaaatgtcatattccgaacgcattgaccagatccgcgacgaactgtctttgaacgaacgctctagtttagaggctttcattttattatgtagcggtggcaccctggaaaactccagctttggtgaatttctgcattggtgggcaatgtcgggttacacgtatcaggcttgtatggattgtttaatctcctataaatttaaggatggccagagtgcgttcgcgcgtcgcttctgggaagaagccgctggcactggccgtctgggctatgtctttggttgtccggtgcgttctgtggtgaacgaacgcgacgcagtacgtgttaccgcacgtgacggtcgcgaattcgcagcgaaacgtttggtttgcacgattccgctgaacgtattgagttctgttcattttagcccaccactgtccccgcaacgcatggccgctgcgaacattggccatgttaaccagtgcgtcaaagtgcatgcggaagtcagttgtccggatatgcgttcatggtcgggtatctcctatccgttcaacaaattagcctacgctatcggcgatggcacgaccccagcgggtaatacgcatattgtgtgccttgggggggcccataatcatatccagccggaagaggacgtggaagcaacgaagatggccgttgaaaacatgtcgcctgggaatatggatatcaaacgtctggtcttccacaactggtgcaaggatgaatttgccaaaggcgcgtggttcttcgcccctccacagctgctgtcaaagagcctggatgaactgcgctgccgtcacggtaatgtcctgtttgcaaactccgattgggccttaggttggcgtggttttatcgatggtgctatcgaggagggcacccgcgcagcggttactgtaattgaggaactgcgtcctgcgcctgcggtgcgttcccacctg

SEQ ID NO: 160 - protein, 495 aa, synthetic construct
  REGION 1..495: note = Variant of monoamine oxidase
MTSRDGYQWTPETGLTQGVPSLGVISPPTNIEDTDKDGPWDVIVIGGGYCGLTATRDLTVAGFKTLLLEARDRIGGRSWSSNIDGYPYEMGGTWVHWHQSHVWREITRYKMHNALSPSFNFSRGVNHFQLRTNPTTSTYMTHEAEDELLRSALHKFTNVDGTNGRTVLPFPHDMFYVPEFRKYDEMSYSERIDQIRDELSLNERSSLEAFILLCSGGTLENSSFGEFLHWWAMSGYTYQACMDCLISYKFKDGQSAFARRFWEEAAGTGRLGYVFGCPVRSVVNERDAVRVTARDGREFAAKRLVCTIPLNVLSSVHFSPPLSPQRMAAANIGHVNQCVKVHAEVSCPDMRSWSGISYPFNKLAYAIGDGTTPAGNTHIVCLGGAHNHIQPEEDVEATKMAVENMSPGNMDIKRLVFHNWCKDEFAKGAWFFAPPQLLSKSLDELRCRHGNVLFANSDWALGWRGFIDGAIEEGTRAAVTVIEELRPAPAVRSHL

SEQ ID NO: 161 - DNA, 1485 bp, synthetic construct
  misc_feature 1..1485: note = Variant of monoamine oxidase
  source 1..1485: mol_type = other DNA
atgaccagccgcgacggctatcagtggaccccggaaacgggtctgacccagggcgtaccgtccctgggtgtcatttcgccgccgactaacatcgaagataccgataaggacgggccttgggatgtcattgtcattgggggcgggtattgtgggctgaccgcaacccgtgatttaaccgtcgcagggttcaagacgctgctgctggaggcccgtgatcgtattggtggccgctcctggagcagtaatattgacggttacccgtatgagatgggtggcacttgggttcattggcatcaatctcacgtgtggcgtgaaatcacgcgttataaaatgcacaacgcgctgtctccatcatttaacttttcacgtggcgtgaatcacttccaactgcgtaccaatccgaccaccagtacgtacatgacgcacgaagcggaggatgaactgctgcgtagcgcattgcataaattcaccaatgtcgacggcactaatggccgtacagtgttgccgttcccacatgatatgttttatgtgccggaatttcgcaagtatgacaagatgtcatattccgaacgcattgaccagatccgcgacgaactgtctttgaacgaacgctctagtttagaggctttcattttattatgtagcggtggcaccctggaaaactccagctttggtgaatttctgcattggtgggcaatgtcgggttacacgtatcagggctgtatggattgtttaatctcctataaatttaaggatggccagagtgcgttcgcgcgtcgcttctgggaagaagccgctggcactggccgtctgggctatgtctttggttgtccggtgcgttctgtggtgaacgaacgcgacgcagtacgtgttaccgcacgtgacggtcgcgaattcgcagcgaaacgtttggtttgcacgattccgctgaacgtattgagttctgttcattttagcccaccactgtccccgcaacgcatggccgctgcgaacattggccatgttaaccagtgcgtcaaagtgcatgcggaagtcagttgtccggatatgcgttcatggtcgggtatctcctatccgttcaacaaattagcctacgctatcggcgatggcacgaccccagcgggtaatacgcatattgtgtgccttgggggggcccataatcatatccagccggaagaggacgtggaagcaacgaagatggccgttgaaaacatgtcgcctgggaatatggatatcaaacgtctggtcttccacaactggtgcaaggatgaatttgccaaaggcgcgtggttcttcgcccctccacagctgctgtcaaagagcctggatgaactgcgctgccgtcacggtaatgtcctgtttgcaaactccgattgggccttaggttggcgtggttttatcgatggtgctatcgaggagggcacccgcgcagcggttactgtaattgaggaactgcgtcctgcgcctgcggtgcgttcccacctg

SEQ ID NO: 162 - protein, 495 aa, synthetic construct
  REGION 1..495: note = Variant of monoamine oxidase
MTSRDGYQWTPETGLTQGVPSLGVISPPTNIEDTDKDGPWDVIVIGGGYCGLTATRDLTVAGFKTLLLEARDRIGGRSWSSNIDGYPYEMGGTWVHWHQSHVWREITRYKMHNALSPSFNFSRGVNHFQLRTNPTTSTYMTHEAEDELLRSALHKFTNVDGTNGRTVLPFPHDMFYVPEFRKYDKMSYSERIDQIRDELSLNERSSLEAFILLCSGGTLENSSFGEFLHWWAMSGYTYQGCMDCLISYKFKDGQSAFARRFWEEAAGTGRLGYVFGCPVRSVVNERDAVRVTARDGREFAAKRLVCTIPLNVLSSVHFSPPLSPQRMAAANIGHVNQCVKVHAEVSCPDMRSWSGISYPFNKLAYAIGDGTTPAGNTHIVCLGGAHNHIQPEEDVEATKMAVENMSPGNMDIKRLVFHNWCKDEFAKGAWFFAPPQLLSKSLDELRCRHGNVLFANSDWALGWRGFIDGAIEEGTRAAVTVIEELRPAPAVRSHL

SEQ ID NO: 163 - DNA, 1485 bp, synthetic construct
  misc_feature 1..1485: note = Variant of monoamine oxidase
  source 1..1485: mol_type = other DNA
atgaccagccgcgacggctatcagtggaccccggaaacgggtctgacccagggcgtaccgtccctgggtgtcatttcgccgccgactaacatcgaagataccgataaggacgggccttgggatgtcattgtcattgggggcgggtattgtgggctgaccgcaacccgtgatttaaccgtcgcagggttcaagacgctgctgctggaggcccgtgatcgtattggtggccgctcctggagcagtaatattgacggttacccgtatgagatgggtggcacttgggttcattggcatcaatctcacgtgtggcgtgaaatcacgcgttataaaatgcacaacgcgctgtctccatcatttaacttttcacgtggcgtgaatcacttccaactgcgtaccaatccgaccaccagtacgtacatgacgcacgaagcggaggatgaactgctgcgtagcgcattgcataaattcaccaatgtcgacggcactaatggccgtacagtgttgccgttcccacatgatatgttttatgtgccggaatttcgcaagtatgacgaaatgtcatattccgaacgcattgaccagatccgcgacgaactgtctttgaacgaacgctctagtttagaggctttcattttattatgtagcggtggcaccctggaaaactccagctttggtgaatttctggagtggtgggcaatgtcgggttacacgtatcagggctgtatggattgtttaatctcctataaatttaaggatggccagagtgcgttcgcgcgtcgcttctgggaagaagccgctggcactggccgtctgggctatgtctttggttgtccggtgcgttctgtggtgaacgaacgcgacgcagtacgtgttaccgcacgtgacggtcgcgaattcgcagcgaaacgtttggtttgcacgattccgctgaacgtattgagttctgttcattttagcccaccactgtccccgcaacgcatggccgctgcgaacattggccatgttaaccagtgcgtcaaagtgcatgcggaagtcagttgtccggatatgcgttcatggtcgggtatctcctatccgttcaacaaattagcctacgctatcggcgatggcacgaccccagcgggtaatacgcatattgtgtgccttgggggggcccataatcatatccagccggaagaggacgtggaagcaacgaagatggccgttgaaaacatgtcgcctgggaatatggatatcaaacgtctggtcttccacaactggtgcaaggatgaatttgccaaaggcgcgtggttcttcgcccctccacagctgctgtcaaagagcctggatgaactgcgctgccgtcacggtaatgtcctgtttgcaaactccgattgggccttaggttggcgtggttttatcgatggtgctatcgaggagggcacccgcgcagcggttactgtaattgaggaactgcgtcctgcgcctgcggtgcgttcccacctg

SEQ ID NO: 164 - protein, 495 aa, synthetic construct
  REGION 1..495: note = Variant of monoamine oxidase
MTSRDGYQWTPETGLTQGVPSLGVISPPTNIEDTDKDGPWDVIVIGGGYCGLTATRDLTVAGFKTLLLEARDRIGGRSWSSNIDGYPYEMGGTWVHWHQSHVWREITRYKMHNALSPSFNFSRGVNHFQLRTNPTTSTYMTHEAEDELLRSALHKFTNVDGTNGRTVLPFPHDMFYVPEFRKYDEMSYSERIDQIRDELSLNERSSLEAFILLCSGGTLENSSFGEFLEWWAMSGYTYQGCMDCLISYKFKDGQSAFARRFWEEAAGTGRLGYVFGCPVRSVVNERDAVRVTARDGREFAAKRLVCTIPLNVLSSVHFSPPLSPQRMAAANIGHVNQCVKVHAEVSCPDMRSWSGISYPFNKLAYAIGDGTTPAGNTHIVCLGGAHNHIQPEEDVEATKMAVENMSPGNMDIKRLVFHNWCKDEFAKGAWFFAPPQLLSKSLDELRCRHGNVLFANSDWALGWRGFIDGAIEEGTRAAVTVIEELRPAPAVRSHL

SEQ ID NO: 165 - DNA, 1485 bp, synthetic construct
  misc_feature 1..1485: note = Variant of monoamine oxidase
  source 1..1485: mol_type = other DNA
atgaccagccgcgacggctatcagtggaccccggaaacgggtctgacccagggcgtaccgtccctgggtgtcatttcgccgccgactaacatcgaagataccgataaggacgggccttgggatgtcattgtcattgggggcgggtattgtgggctgaccgcaacccgtgatttaaccgtcgcagggttcaagacgctgctgctggaggcccgtgatcgtattggtggccgctcctggagcagtaatattgacggttacccgtatgagatgggtggcacttgggttcattggcatcaatctcacgtgtggcgtgaaatcacgcgttataaaatgcacaacgcgctgtctccatcatttaacttttcacgtggcgtgaatcacttccaactgcgtaccaatccgaccaccagtacgtacatgacgcacgaagcggaggatgcactgctgcgtagcgcattgcataaattcaccaatgtcgacggcactaatggccgtacagtgttgccgttcccacatgatatgttttatgtgccggaatttcgcaagtatgacgaaatgtcatattccgaacgcattgaccagatccgcgacgaactgtctttgaacgaacgctctagtttagaggctttcattttattatgtagcggtggcaccctggaaaactccagctttggtgaatttctgcattggtgggcaatgtcgggttacacgtatcagggctgtatggattgtttaatctcctataaatttaaggatggccagagtgcgttcgcgcgtcgcttctgggaagaagccgctggcactggccgtctgggctatgtctttggttgtccggtgcgttctgtggtgaacgaacgcgacgcagtacgtgttaccgcacgtgacggtcgcgaattcgcagcgaaacgtttggtttgcacgattccgctgaacgtattgagttctgttcattttagcccaccactgtccccgcaacgcatggccgctgcgaacattggccatgttaaccagtgcgtcaaagtgcatgcggaagtcagttgtccggatatgcgttcatggtcgggtatctcctatccgttcaacaaattagcctacgctatcggcgatggcacgaccccagcgggtaatacgcatattgtgtgccttgggggggcccataatcatatccagccggaagaggacgtggaagcaacgaagatggccgttgaaaacatgtcgcctgggaatatggatatcaaacgtctggtcttccacaactggtgcaaggatgaatttgccaaaggcgcgtggttcttcgcccctccacagctgctgtcaaagagcctggatgaactgcgctgccgtcacggtaatgtcctgtttgcaaactccgattgggccttaggttggcgtggttttatcgatggtgctatcgaggagggcacccgcgcagcggttactgtaattgaggaactgcgtcctgcgcctgcggtgcgttcccacctg

SEQ ID NO: 166 - protein, 495 aa, synthetic construct
  REGION 1..495: note = Variant of monoamine oxidase
MTSRDGYQWTPETGLTQGVPSLGVISPPTNIEDTDKDGPWDVIVIGGGYCGLTATRDLTVAGFKTLLLEARDRIGGRSWSSNIDGYPYEMGGTWVHWHQSHVWREITRYKMHNALSPSFNFSRGVNHFQLRTNPTTSTYMTHEAEDALLRSALHKFTNVDGTNGRTVLPFPHDMFYVPEFRKYDEMSYSERIDQIRDELSLNERSSLEAFILLCSGGTLENSSFGEFLHWWAMSGYTYQGCMDCLISYKFKDGQSAFARRFWEEAAGTGRLGYVFGCPVRSVVNERDAVRVTARDGREFAAKRLVCTIPLNVLSSVHFSPPLSPQRMAAANIGHVNQCVKVHAEVSCPDMRSWSGISYPFNKLAYAIGDGTTPAGNTHIVCLGGAHNHIQPEEDVEATKMAVENMSPGNMDIKRLVFHNWCKDEFAKGAWFFAPPQLLSKSLDELRCRHGNVLFANSDWALGWRGFIDGAIEEGTRAAVTVIEELRPAPAVRSHL

SEQ ID NO: 167 - DNA, 1485 bp, synthetic construct
  misc_feature 1..1485: note = Variant of monoamine oxidase
  source 1..1485: mol_type = other DNA
atgaccagccgcgacggctatcagtggaccccggaaacgggtctgacccagggcgtaccgtccctgggtgtcatttcgccgccgactaacatcgaagataccgataaggacgggccttgggatgtcattgtcattgggggcgggtattgtgggctgaccgcaacccgtgatttaaccgtcgcagggttcaagacgctgctgctggaggcccgtgatcgtattggtggccgctcctggagcagtaatattgacggttacccgtatgagatgggtggcacttgggttcattggcatcaatctcacgtgtggcgtgaaatcacgcgttataaaatgcacaacgcgctgtctccatcatttaacttttcacgtggcgtgaatcacttccaactgcgtaccaatccgaccaccagtacgtacatgacgcacgaagcggaggatgaactgctgcgtagcgcattgcataaattcaccaatgtcgacggcactaatggccgtacagtgttgccgttcccacatgatatgttttatgtgccggaatttcgcaagtatgacgaaatgtcatattccgaacgcattgaccagatccgcgacgaactgtctttgaacgaacgctctagtttagaggctttcattttattatgtagcggtggcaccctggaaaactccagctttggtgaatttctgcattggtgggcaatgtcgggttacacgtatcagggctgtatggattgtttaatctcctataaatttaaggatggccagagtgcgttcgcgcgtcgcttctgggaagaagccgctggcactggccgtctgggctatgtctttggttgtccggtgcgttctgtggtgaacgaacgcgacgcagtacgtgttaccgcacgtgacggtcgcgaattcgcagcgaaacgtttggtttgcacgattccgctgaacgtattgagttctgttcattttagcccaccactgtccccgcaacgcatggccgctgcgaacattggccatgttaaccagtgcgtcaaagtgcatgcggaagtcagttgtccggatatgcgttcatggtcgggtatctcctatccgttcaacaaattagcctacgctatcggcgatggcacgaccccagcgggtaatacgcatattgtgtgccttgggggggcccataatcatatccagccggaagaggacgtggaagcaacgaagatggccgttgaaaacatgtcgcctgggaatatggatatcaaacgtctggtcttccacaactggtgcaaggatgaatttgccaaaggcgcgtggttcttcaatcctccacagctgctgtcaaagagcctggatgaactgcgctgccgtcacggtaatgtcctgtttgcaaactccgattgggccttaggttggcgtggttttatcgatggtgctatcgaggagggcacccgcgcagcggttactgtaattgaggaactgcgtcctgcgcctgcggtgcgttcccacctg

SEQ ID NO: 168 - protein, 495 aa, synthetic construct
  REGION 1..495: note = Variant of monoamine oxidase
MTSRDGYQWTPETGLTQGVPSLGVISPPTNIEDTDKDGPWDVIVIGGGYCGLTATRDLTVAGFKTLLLEARDRIGGRSWSSNIDGYPYEMGGTWVHWHQSHVWREITRYKMHNALSPSFNFSRGVNHFQLRTNPTTSTYMTHEAEDELLRSALHKFTNVDGTNGRTVLPFPHDMFYVPEFRKYDEMSYSERIDQIRDELSLNERSSLEAFILLCSGGTLENSSFGEFLHWWAMSGYTYQGCMDCLISYKFKDGQSAFARRFWEEAAGTGRLGYVFGCPVRSVVNERDAVRVTARDGREFAAKRLVCTIPLNVLSSVHFSPPLSPQRMAAANIGHVNQCVKVHAEVSCPDMRSWSGISYPFNKLAYAIGDGTTPAGNTHIVCLGGAHNHIQPEEDVEATKMAVENMSPGNMDIKRLVFHNWCKDEFAKGAWFFNPPQLLSKSLDELRCRHGNVLFANSDWALGWRGFIDGAIEEGTRAAVTVIEELRPAPAVRSHL

SEQ ID NO: 169 - DNA, 1485 bp, synthetic construct
  misc_feature 1..1485: note = Variant of monoamine oxidase
  source 1..1485: mol_type = other DNA
atgaccagccgcgacggctatcagtggaccccggaaacgggtctgacccagggcgtaccgtccctgggtgtcatttcgccgccgactaacatcgaagataccgataaggacgggccttgggatgtcattgtcattgggggcgggtattgtgggctgaccgcaacccgtgatttaaccgtcgcagggttcaagacgctgctgctggaggcccgtgatcgtattggtggccgctcctggagcagtaatattgacggttacccgtatgagatgggtggcacttgggttcattggcatcaatctcacgtgtggcgtgaaatcacgcgttataaaatgcacaacgcgctgtctccatcatttaacttttcacgtggcgtgaatcacttccaactgcgtaccaatccgaccaccagtacgtacatgacgcacgaagcggaggatgaactgctgcgtagcgcattgcataaattcaccaatgtcgaccgtactaatggccgtacagtgttgccgttcccacatgatatgttttatgtgccggaatttcgcaagtatgacgaaatgtcatattccgaacgcattgaccagatccgcgacgaactgtctttgaacgaacgctctagtttagaggctttcattttattatgtagcggtggcaccctggaaaactccagctttggtgaatttctgcattggtgggcaatgtcgggttacacgtatcagggctgtatggattgtttaatctcctataaatttaaggatggccagagtgcgttcgcgcgtcgcttctgggaagaagccgctggcactggccgtctgggctatgtctttggttgtccggtgcgttctgtggtgaacgaacgcgacgcagtacgtgttaccgcacgtgacggtcgcgaattcgcagcgaaacgtttggtttgcacgattccgctgaacgtattgagttctgttcattttagcccaccactgtccccgcaacgcatggccgctgcgaacattggccatgttaaccagtgcgtcaaagtgcatgcggaagtcagttgtccggatatgcgttcatggtcgggtatctcctatccgttcaacaaattagcctacgctatcggcgatggcacgaccccagcgggtaatacgcatattgtgtgccttgggggggcccataatcatatccagccggaagaggacgtggaagcaacgaagatggccgttgaaaacatgtcgcctgggaatatggatatcaaacgtctggtcttccacaactggtgcaaggatgaatttgccaaaggcgcgtggttcttcgcccctccacagctgctgtcaaagagcctggatgaactgcgctgccgtcacggtaatgtcctgtttgcaaactccgattgggccttaggttggcgtggttttatcgatggtgctatcgaggagggcacccgcgcagcggttactgtaattgaggaactgcgtcctgcgcctgcggtgcgttcccacctg

SEQ ID NO: 170 - protein, 495 aa, synthetic construct
  REGION 1..495: note = Variant of monoamine oxidase
MTSRDGYQWTPETGLTQGVPSLGVISPPTNIEDTDKDGPWDVIVIGGGYCGLTATRDLTVAGFKTLLLEARDRIGGRSWSSNIDGYPYEMGGTWVHWHQSHVWREITRYKMHNALSPSFNFSRGVNHFQLRTNPTTSTYMTHEAEDELLRSALHKFTNVDRTNGRTVLPFPHDMFYVPEFRKYDEMSYSERIDQIRDELSLNERSSLEAFILLCSGGTLENSSFGEFLHWWAMSGYTYQGCMDCLISYKFKDGQSAFARRFWEEAAGTGRLGYVFGCPVRSVVNERDAVRVTARDGREFAAKRLVCTIPLNVLSSVHFSPPLSPQRMAAANIGHVNQCVKVHAEVSCPDMRSWSGISYPFNKLAYAIGDGTTPAGNTHIVCLGGAHNHIQPEEDVEATKMAVENMSPGNMDIKRLVFHNWCKDEFAKGAWFFAPPQLLSKSLDELRCRHGNVLFANSDWALGWRGFIDGAIEEGTRAAVTVIEELRPAPAVRSHL

SEQ ID NO: 171 - DNA, 1485 bp, synthetic construct
  misc_feature 1..1485: note = Variant of monoamine oxidase
  source 1..1485: mol_type = other DNA
atgaccagccgcgacggctatcagtggaccccggaaacgggtctgacccagggcgtaccgtccctgggtgtcatttcgccgccgactaacatcgaagataccgataaggacgggccttgggatgtcattgtcattgggggcgggtattgtgggctgaccgcaacccgtgatttaaccgtcgcagggttcaagacgctgctgctggaggcccgtgatcgtattggtggccgctcctggagcagtaatattgacggttacccgtatgagatgggtggcacttgggttcattggcatcaatctcacgtgtggcgtgaaatcacgcgttataaaatgcacaacgcgctgtctccatcatttaacttttcacgtggcgtgaatcacttccaactgcgtaccaatccgaccaccagtacgtacatgacgcacgaagcggaggatgaactgctgcgtagcgcattgcataaattcaccaatgtcgacggccaaaatggccgtacagtgttgccgttcccacatgatatgttttatgtgccggaatttcgcaagtatgacgaaatgtcatattccgaacgcattgaccagatccgcgacgaactgtctttgaacgaacgctctagtttagaggctttcattttattatgtagcggtggcaccctggaaaactccagctttggtgaatttctgcattggtgggcaatgtcgggttacacgtatcagggctgtatggattgtttaatctcctataaatttaaggatggccagagtgcgttcgcgcgtcgcttctgggaagaagccgctggcactggccgtctgggctatgtctttggttgtccggtgcgttctgtggtgaacgaacgcgacgcagtacgtgttaccgcacgtgacggtcgcgaattcgcagcgaaacgtttggtttgcacgattccgctgaacgtattgagttctgttcattttagcccaccactgtccccgcaacgcatggccgctgcgaacattggccatgttaaccagtgcgtcaaagtgcatgcggaagtcagttgtccggatatgcgttcatggtcgggtatctcctatccgttcaacaaattagcctacgctatcggcgatggcacgaccccagcgggtaatacgcatattgtgtgccttgggggggcccataatcatatccagccggaagaggacgtggaagcaacgaagatggccgttgaaaacatgtcgcctgggaatatggatatcaaacgtctggtcttccacaactggtgcaaggatgaatttgccaaaggcgcgtggttcttcgcccctccacagctgctgtcaaagagcctggatgaactgcgctgccgtcacggtaatgtcctgtttgcaaactccgattgggccttaggttggcgtggttttatcgatggtgctatcgaggagggcacccgcgcagcggttactgtaattgaggaactgcgtcctgcgcctgcggtgcgttcccacctg

SEQ ID NO: 172 - protein, 495 aa, synthetic construct
  REGION 1..495: note = Variant of monoamine oxidase
MTSRDGYQWTPETGLTQGVPSLGVISPPTNIEDTDKDGPWDVIVIGGGYCGLTATRDLTVAGFKTLLLEARDRIGGRSWSSNIDGYPYEMGGTWVHWHQSHVWREITRYKMHNALSPSFNFSRGVNHFQLRTNPTTSTYMTHEAEDELLRSALHKFTNVDGQNGRTVLPFPHDMFYVPEFRKYDEMSYSERIDQIRDELSLNERSSLEAFILLCSGGTLENSSFGEFLHWWAMSGYTYQGCMDCLISYKFKDGQSAFARRFWEEAAGTGRLGYVFGCPVRSVVNERDAVRVTARDGREFAAKRLVCTIPLNVLSSVHFSPPLSPQRMAAANIGHVNQCVKVHAEVSCPDMRSWSGISYPFNKLAYAIGDGTTPAGNTHIVCLGGAHNHIQPEEDVEATKMAVENMSPGNMDIKRLVFHNWCKDEFAKGAWFFAPPQLLSKSLDELRCRHGNVLFANSDWALGWRGFIDGAIEEGTRAAVTVIEELRPAPAVRSHL

SEQ ID NO: 173 - DNA, 1485 bp, synthetic construct
  misc_feature 1..1485: note = Variant of monoamine oxidase
  source 1..1485: mol_type = other DNA
atgaccagccgcgacggctatcagtggaccccggaaacgggtctgacccagggcgtaccgtccctgggtgtcatttcgccgccgactaacatcgaagataccgataaggacgggccttgggatgtcattgtcattgggggcgggtattgtgggctgaccgcagctcgtgatttaaccgtcgcagggttcaagacgctgctgctggaggcccgtgatcgtattggtggccgctcctggagcagtaatattgacggttacccgtatgagatgggtggcacttgggttcattggcatcaatctcacgtgtggcgtgaaatcacgcgttataaaatgcacaacgcgctgtctccatcatttaacttttcacgtggcgtgaatcacttccaactgcgtaccaatccgaccaccagtacgtacatgacgcacgaagcggaggatgaactgctgcgtagcgcattgcataaattcaccaatgtcgacggcactaatggccgtacagtgttgccgttcccacatgatatgttttatgtgccggaatttcgcaagtatgacgaaatgtcatattccgaacgcattgaccagatccgcgacgaactgtctttgaacgaacgctctagtttagaggctttcattttattatgtagcggtggcaccctggaaaactccagctttggtgaatttctgcattggtgggcaatgtcgggttacacgtatcagggctgtatggattgtttaatctcctataaatttaaggatggccagagtgcgttcgcgcgtcgcttctgggaagaagccgctggcactggccgtctgggctatgtctttggttgtccggtgcgttctgtggtgaacgaacgcgacgcagtacgtgttaccgcacgtgacggtcgcgaattcgcagcgaaacgtttggtttgcacgattccgctgaacgtattgagttctgttcattttagcccaccactgtccccgcaacgtatggccgctgcgaacattggccatgttaaccagtgcgtcaaagtgcatgcggaagtcagtgataaggatatgcgttcatggtcgggtatctcctatccgttcaacaaattagcctacgctatcggcgatggcacgaccccagcgggtaatacgcatattgtgtgccttgggggggcccataatcatatccagccggaagaggacgtggaagcaacgaagatggccgttgaaaacatgtcgcctgggaatatggatatcaaacgtctggtcttccacaactggtgcaaggatgaatttgccaaaggcgcgtggttcttcgcccctccacaactgctgtcaaagagcctggatgaactgcgctgccgtcacggtaatgtcctgtttgcaaactccgattgggccttaggttggcgtggttttatcgatggtgctatcgaggagggcacccgcgcagcggttactgtaattgaggaactgcgtcctgcgcctgcggtgcgttcccacctg

SEQ ID NO: 174 - protein, 495 aa, synthetic construct
  REGION 1..495: note = Variant of monoamine oxidase
MTSRDGYQWTPETGLTQGVPSLGVISPPTNIEDTDKDGPWDVIVIGGGYCGLTAARDLTVAGFKTLLLEARDRIGGRSWSSNIDGYPYEMGGTWVHWHQSHVWREITRYKMHNALSPSFNFSRGVNHFQLRTNPTTSTYMTHEAEDELLRSALHKFTNVDGTNGRTVLPFPHDMFYVPEFRKYDEMSYSERIDQIRDELSLNERSSLEAFILLCSGGTLENSSFGEFLHWWAMSGYTYQGCMDCLISYKFKDGQSAFARRFWEEAAGTGRLGYVFGCPVRSVVNERDAVRVTARDGREFAAKRLVCTIPLNVLSSVHFSPPLSPQRMAAANIGHVNQCVKVHAEVSDKDMRSWSGISYPFNKLAYAIGDGTTPAGNTHIVCLGGAHNHIQPEEDVEATKMAVENMSPGNMDIKRLVFHNWCKDEFAKGAWFFAPPQLLSKSLDELRCRHGNVLFANSDWALGWRGFIDGAIEEGTRAAVTVIEELRPAPAVRSHL

SEQ ID NO: 175 - DNA, 1485 bp, synthetic construct
  misc_feature 1..1485: note = Variant of monoamine oxidase
  source 1..1485: mol_type = other DNA
atgaccagccgcgacggctatcagtggaccccggaaacgggtctgacccagggcgtaccgtccctgggtgtcatttcgccgccgactaacatcgaagataccgataaggacgggccttgggatgtcattgtcattgggggcgggtattgtgggctgaccgcaacccgtgatttaaccgtcgcagggttcaagacgctgctgctggaggcccgtgatcgtattggtggccgctcctggagcagtaatattgacggttacccgtatgagatgggtggcacttgggttcattggcatcaatctcacgtgtggcgtgaaatcacgcgttataaaatgcacaacgcgctgtctccatcatttaacttttcacgtggcgtgaatcacttccaactgcgtaccaatccgaccaccagtacgtacatgacgcacgaagcggaggatgaactgatgcgtagcgcattgcataaattcgccaatgtcgacggcactaatggccgtacagtgttgccgttcccacatgatatgttttatgtgccggaatttcgcaagtatgacgaaatgtcatattccgaacgcattgaccagatccgcgacgaactgtctttgaacgaacgctctagtttagaggctttcattttattatgtagcggtggcaccctggaaaactccagctttggtgaatttctgcattggtgggcaatgtcgggttacacgtatcagggctgtatggattgtttaatctcctataaatttaaggatggccagagtgcgttcgcgcgtcgcttctgggaagaagccgctggcactggccgtctgggctatgtctttggttgtccggtgcgttctgtggtgaacgaacgcgacgcagtacgtgttaccgcacgtgacggtcgcgaattcgcagcgaaacgtttggtttgcacgattccgctgaacgtattgagttctgttcattttagcccaccactgtccccgcaacgcatggccgctgcgaacattggccatgttaaccagtgcgtcaaagtgcatgcggaagtcagttgtccggatatgcgttcatggtcgggtatctcctatccgttcaacaaattagcctacgctatcggcgatggcacgaccccagcgggtaatacgcatattgtgtgccttgggggggcccataatcatatccagccggaagaggacgtggaagcaacgaagatggccgttgaaaacatgtcgcctgggaatatggatatcaaacgtctggtcttccacaactggtgcaaggatgaatttgccaaaggcgcgtggttcttcgcccctccacagctgctgtcaaagagcctggatgaactgcgctgccgtcacggtaatgtcctgtttgcaaactccgattgggccttaggttggcgtggttttatcgatggtgctatcgaggagggcacccgcgcagcggttactgtaattgaggaactgcgtcctgcgcctgcggtgcgttcccacctg

SEQ ID NO: 176 - protein, 495 aa, synthetic construct
  REGION 1..495: note = Variant of monoamine oxidase
MTSRDGYQWTPETGLTQGVPSLGVISPPTNIEDTDKDGPWDVIVIGGGYCGLTATRDLTVAGFKTLLLEARDRIGGRSWSSNIDGYPYEMGGTWVHWHQSHVWREITRYKMHNALSPSFNFSRGVNHFQLRTNPTTSTYMTHEAEDELMRSALHKFANVDGTNGRTVLPFPHDMFYVPEFRKYDEMSYSERIDQIRDELSLNERSSLEAFILLCSGGTLENSSFGEFLHWWAMSGYTYQGCMDCLISYKFKDGQSAFARRFWEEAAGTGRLGYVFGCPVRSVVNERDAVRVTARDGREFAAKRLVCTIPLNVLSSVHFSPPLSPQRMAAANIGHVNQCVKVHAEVSCPDMRSWSGISYPFNKLAYAIGDGTTPAGNTHIVCLGGAHNHIQPEEDVEATKMAVENMSPGNMDIKRLVFHNWCKDEFAKGAWFFAPPQLLSKSLDELRCRHGNVLFANSDWALGWRGFIDGAIEEGTRAAVTVIEELRPAPAVRSHL

SEQ ID NO: 177 - DNA, 1485 bp, synthetic construct
  misc_feature 1..1485: note = Variant of monoamine oxidase
  source 1..1485: mol_type = other DNA
atgaccagccgcgacggctatcagtggaccccggaaacgggtctgacccagggcgtaccgtccctgggtgtcatttcgccgccgactaacatcgaagataccgataaggacgggccttgggatgtcattgtcattgggggcgggtattgtgggctgaccgcaacccgtgatttaaccgtcgcagggttcaagacgctgctgctggaggcccgtgatcgtattggtggccgctcctggagcagtaatattgacggttacccgtatgagatgggtggcacttgggttcattggcatcaatctcacgtgtggcgtgaaatcacgcgttataaaatgcacaacgcgctgtctccatcatttaacttttcacgtggcgtgaatcacttccaactgcgtaccaatccgaccaccagtacgtacatgacgcacgaagcggaggatgaactgctgcgtagcgcattgcataaattcaccaatgtcgacggcactaatggccgtacagtgttgccgttcccacatgatatgttttatgtgccggaatttcgcaagtatgacgaaatgtcatattccgaacgcattgaccagatccgcgacgaactgtctttgaacgaacgctctagtttagaggctttcattttattatgtagcggtggcaccctggaagtgtccagctttggtgaatttctgcattggtgggcaatgtcgggttacacgtatcagggctgtatggattgtttaatctcctataaatttaaggatggccagagtgcgttcgcgcgtcgcttctgggaagaagccgctggcactggccgtctgggctatgtctttggttgtccggtgcgttctgtggtgaacgaacgcgacgcagtacgtgttaccgcacgtgacggtcgcgaattcgcagcgaaacgtttggtttgcacgattccgctgaacgtattgagttctgttcattttagcccaccactgtccccgcaacgcatggccgctgcgaacattggccatgttaaccagtgcgtcaaagtgcatgcggaagtcagttgtccggatatgcgttcatggtcgggtatctcctatccgttcaacaaattagcctacgctatcggcgatggcacgaccccagcgggtaatacgcatattgtgtgccttgggggggcccataatcatatccagccggaagaggacgtggaagcaacgaagatggccgttgaaaacatgtcgcctgggaatatggatatcaaacgtctggtcttccacaactggtgcaaggatgaatttgccaaaggcgcgtggttcttcgcccctccacagctgctgtcaaagagcctggatgaactgcgctgccgtcacggtaatgtcctgtttgcaaactccgattgggccttaggttggcgtggttttatcgatggtgctatcgaggagggcacccgcgcagcggttactgtaattgaggaactgcgtcctgcgcctgcggtgcgttcccacctg

SEQ ID NO: 178 - protein, 495 aa, synthetic construct
  REGION 1..495: note = Variant of monoamine oxidase
MTSRDGYQWTPETGLTQGVPSLGVISPPTNIEDTDKDGPWDVIVIGGGYCGLTATRDLTVAGFKTLLLEARDRIGGRSWSSNIDGYPYEMGGTWVHWHQSHVWREITRYKMHNALSPSFNFSRGVNHFQLRTNPTTSTYMTHEAEDELLRSALHKFTNVDGTNGRTVLPFPHDMFYVPEFRKYDEMSYSERIDQIRDELSLNERSSLEAFILLCSGGTLEVSSFGEFLHWWAMSGYTYQGCMDCLISYKFKDGQSAFARRFWEEAAGTGRLGYVFGCPVRSVVNERDAVRVTARDGREFAAKRLVCTIPLNVLSSVHFSPPLSPQRMAAANIGHVNQCVKVHAEVSCPDMRSWSGISYPFNKLAYAIGDGTTPAGNTHIVCLGGAHNHIQPEEDVEATKMAVENMSPGNMDIKRLVFHNWCKDEFAKGAWFFAPPQLLSKSLDELRCRHGNVLFANSDWALGWRGFIDGAIEEGTRAAVTVIEELRPAPAVRSHL

SEQ ID NO: 179 - DNA, 1485 bp, synthetic construct
  misc_feature 1..1485: note = Variant of monoamine oxidase
  source 1..1485: mol_type = other DNA
atgaccagccgcgacggctatcagtggaccccggaaacgggtctgacccagggcgtaccgtccctgggtgtcatttcgccgccgactaacatcgaagataccgataaggacgggccttgggatgtcattgtcattgggggggggtattgtgggctgaccgcaacccgtgatttaaccgtcgcagggttcaagacgctgctgctggaggcccgtgatcgtattggtggccgctcctggagcagtaatattgacggttacccgtatgagatgggtggcacttgggttcattggcatcaaccgcacgtgtggcgtgaaatcacgcgttataaaatgcacaacgcgctgtctccatcatttaacttttcacgtggcgtgaatcacttccaactgcgtaccaatccgaccaccagtacgtacatgacgcacgaagaggaggatgaactgctgcgtagcgcattgcataaattcaccaatgtcgacggcactaatggccgtacagtgttgccgttcccacatgatatgttttatgtgccggaatttcgcaagtatgacgaaatgtcatattccgaacgcattgaccagatccgcgacgaactgtctttgaacgaacgctctagtttagaggctttcattttattatgtagcggtggcaccctggaaaactccagctttggtgaatttctgcattggtgggcaatgtcgggttacacgtatcagggctgtatggattgtttaatctcctataaatttaaggatggccagagtgcgttcgcgcgtcgcttctgggaagaagccgcaggcactggccgtctgggctatgtctttggttgtccggtgcgttctgtggtgaacgaacgcgacgcagtacgtgttaccgcacgtgacggtcgcgaattcgcagcgaaacgtttggtttgcacgattccgctgaacgtattgagttctgttcattttagcccaccactgtccccgcaacgcatggccgctgcgaacattggccatgttaaccagtgcgtcaaagtgcatgcggaagtcagttgtccggatatgcgttcatggtcgggtatttcctatccgttcaacaaattagcctacgctatcggcgatggcacgaccccagcgggtaatacgcatattgtgtgccttgggggggcccataatcatatccagccggaagaggacgtggaagcaacgaagatggccgttgaaaacatgtcgcctgggaatatggatatcaaacgtctggtcttccacaactggagcaaggatgaatttgccaaaggcgcgtggttcttcgcccctccacagctgctgtcaaagagcctggatgaactgcgcgcacgtcacggtaatgtcctgtttgcaaactccgattgggccttaggttggcgtggttttatcgatggtgctatcgaggagggcacccgcgcagcggttactgtaattgaggaactgcgtcctgcgcctgcggtgcgttcccacctg

SEQ ID NO: 180 - protein, 495 aa, synthetic construct
  REGION 1..495: note = Variant of monoamine oxidase
MTSRDGYQWTPETGLTQGVPSLGVISPPTNIEDTDKDGPWDVIVIGGGYCGLTATRDLTVAGFKTLLLEARDRIGGRSWSSNIDGYPYEMGGTWVHWHQPHVWREITRYKMHNALSPSFNFSRGVNHFQLRTNPTTSTYMTHEEEDELLRSALHKFTNVDGTNGRTVLPFPHDMFYVPEFRKYDEMSYSERIDQIRDELSLNERSSLEAFILLCSGGTLENSSFGEFLHWWAMSGYTYQGCMDCLISYKFKDGQSAFARRFWEEAAGTGRLGYVFGCPVRSVVNERDAVRVTARDGREFAAKRLVCTIPLNVLSSVHFSPPLSPQRMAAANIGHVNQCVKVHAEVSCPDMRSWSGISYPFNKLAYAIGDGTTPAGNTHIVCLGGAHNHIQPEEDVEATKMAVENMSPGNMDIKRLVFHNWSKDEFAKGAWFFAPPQLLSKSLDELRARHGNVLFANSDWALGWRGFIDGAIEEGTRAAVTVIEELRPAPAVRSHL

SEQ ID NO: 181 - DNA, 1485 bp, synthetic construct
  misc_feature 1..1485: note = Variant of monoamine oxidase
  source 1..1485: mol_type = other DNA
atgaccagccgcgacggctatcagtggaccccggaaacgggtctgacccagggcgtaccgtccctgggtgtcatttcgccgccgactaacatcgaagataccgataaggacgggccttgggatgtcattgtcattgggggcgggtattgtgggctgaccgcaacccgtgatttaaccgtcgcagggttcaagacgctgctgctggaggcccgtgatcgtattggtggccgctcctggagcagtaatattgacggttacccgtatgagatgggtggcacttgggttcattggcatcaatctcacgtgtggcgtgaaatcacgcgttataaaatgcacaacgcgctgtctccatcatttaacttttcacgtggcgtgaatcacttccaactgcgtaccaatccgaccaccagtacgtacatgacgcacgaagcggaggatgaactgctgcgtagcgcattgcataaattcaccaatgtcgacggcactaatggccgtacagtgttgccgttcccacatgatatgttttatgtgccggaatttcgcaagtatgacgaaatgtcatattccgaacgcattgaccagatccgcgacgaactgtctttgaacgaacgctctagtttagaggctttcattttattatgtagcggtggcaccctggaaaactccagctttggtgaatttctgcattggtgggcaatgtcgggttacacgtatcagggctgtatggattgtttaatctcctataaatttaaggatggccagagtgcgttcgcgcgtcgcttctgggaagaagccgctggcactggccgtctgggctatgtctttggttgtccggtgcgttctgtggtgaacgaacgcgacgcagtacgtgttaccgcacgtgacggtcgcgaattcgcagcgaaacgtttggtttgcacgattccgctgaacgtattgagttctgttcattttagcccaccactgtccccgcaacgcatggccgctgcgaacattggccatgttaaccagtgcgtcaaagtgcatgcggaagtcagttgtccggatatgcgttcatggtcgggtatctcctatccgttcaacaaattagcctacgctatcggcgatggcacgaccccagcgggtaatacgcatattgtgtgccttgggggggcccataatcatatccagccggaagaggacgtggaagcaacgaagatggccgttgaaaacatgtcgcctgggaatatggatatcaaacgtctggtcttccacaactggtgcaaggatgaatttgccaaaggcgcgtggttcttcgcccctccacagctgctgtcaaagagcctggatttgctgcgctgccgtcacggtaatgtcctgtttgcaaactccgattgggccttaggttggcgtggttttatcgatggtgctatcgaggagggcacccgcgcagcggttactgtaattgaggaactgcgtcctgcgcctgcggtgcgttcccacctg

SEQ ID NO: 182 - protein, 495 aa, synthetic construct
  REGION 1..495: note = Variant of monoamine oxidase
MTSRDGYQWTPETGLTQGVPSLGVISPPTNIEDTDKDGPWDVIVIGGGYCGLTATRDLTVAGFKTLLLEARDRIGGRSWSSNIDGYPYEMGGTWVHWHQSHVWREITRYKMHNALSPSFNFSRGVNHFQLRTNPTTSTYMTHEAEDELLRSALHKFTNVDGTNGRTVLPFPHDMFYVPEFRKYDEMSYSERIDQIRDELSLNERSSLEAFILLCSGGTLENSSFGEFLHWWAMSGYTYQGCMDCLISYKFKDGQSAFARRFWEEAAGTGRLGYVFGCPVRSVVNERDAVRVTARDGREFAAKRLVCTIPLNVLSSVHFSPPLSPQRMAAANIGHVNQCVKVHAEVSCPDMRSWSGISYPFNKLAYAIGDGTTPAGNTHIVCLGGAHNHIQPEEDVEATKMAVENMSPGNMDIKRLVFHNWCKDEFAKGAWFFAPPQLLSKSLDLLRCRHGNVLFANSDWALGWRGFIDGAIEEGTRAAVTVIEELRPAPAVRSHL

SEQ ID NO: 183 - DNA, 1485 bp, synthetic construct
  misc_feature 1..1485: note = Variant of monoamine oxidase
  source 1..1485: mol_type = other DNA
atgaccagccgcgacggctatcagtggaccccggaaacgggtctgacccagggcgtaccgtccctgggtgtcatttcgccgccgactaacatcgaagataccgataaggacgggccttgggatgtcattgtcattgggggcgggtattgtgggctgaccgcaacccgtgatttaaccgtcgcagggttcaagacgctgctgctggaggcccgtgatcgtattggtggccgctcctggagcagtaatattgacggttacccgtatgagatgggtggcacttgggttcattggcatcaatctcacgtgtggcgtgaaatcacgcgttataaaatgcacaacgcgctgtctccatcatttaacttttcacgtggcgtgaatcacttccaactgcgtaccaatccgaccaccagtacgtacatgacgcacgaagcggaggatgaactgctgcgtagcgcattgcataaattcaccaatgtcgacggcactaatggccgtacagtgttgccgttcccacatgatatgttttatgtgccggaatttcgcaagtatgacgaaatgtcatattccgaacgcattgaccagatccgcgacgaactgtctttgaacgaacgctctagtttagaggctttcattttattatgtagcggtggcaccctggaaaactccagctttggtgaatttctgcattggtgggcaatgtcgggttacacgtatcagggctgtatggattgtttaatctcctataaatttaaggatggccagagtgcgttcgcgcgtcgcttctgggaagaagccgctggcactggccgtctgggctatgtctttggttgtccggtgcgttctgtggtgaacgaacgcgacgcagtacgtgttaccgcacgtgacggtcgcgaattcgcagcgaaacgtttggtttgcacgattccgctgaacgtattgagttctgttcattttagcccaccactgtccccgcaacgcatggccgctgcgaacattggccatgttaaccagtgcgtcaaagtgcatgcggaagtcagttgtccggatatgcgttcatggtcgggtatctcctatccgttcaacaaattagcctacgctatcggcgatggcacgaccccagcgggtaatacgcatattgtgtgccttgggggggcccataatcatatccagccggaagaggacgtggaagcaacgaagatggccgttgaaaacatgtcgcctgggaatatggatatcaaacgtctggtcttccacaactggtgcaaggatgaatttgccaaaggcgcgtggttcttcgcccctccacagctgctgtcaaagagcctggatgacctgcgctgccgtcacggtaatgtcctgtttgcaaactccgattgggccttaggttggcgtggttttatcgatggtgctatcgaggagggcacccgcgcagcggttactgtaattgaggaactgcgtcctgcgcctgcggtgcgttcccacctg

SEQ ID NO: 184 - protein, 495 aa, synthetic construct
  REGION 1..495: note = Variant of monoamine oxidase
MTSRDGYQWTPETGLTQGVPSLGVISPPTNIEDTDKDGPWDVIVIGGGYCGLTATRDLTVAGFKTLLLEARDRIGGRSWSSNIDGYPYEMGGTWVHWHQSHVWREITRYKMHNALSPSFNFSRGVNHFQLRTNPTTSTYMTHEAEDELLRSALHKFTNVDGTNGRTVLPFPHDMFYVPEFRKYDEMSYSERIDQIRDELSLNERSSLEAFILLCSGGTLENSSFGEFLHWWAMSGYTYQGCMDCLISYKFKDGQSAFARRFWEEAAGTGRLGYVFGCPVRSVVNERDAVRVTARDGREFAAKRLVCTIPLNVLSSVHFSPPLSPQRMAAANIGHVNQCVKVHAEVSCPDMRSWSGISYPFNKLAYAIGDGTTPAGNTHIVCLGGAHNHIQPEEDVEATKMAVENMSPGNMDIKRLVFHNWCKDEFAKGAWFFAPPQLLSKSLDDLRCRHGNVLFANSDWALGWRGFIDGAIEEGTRAAVTVIEELRPAPAVRSHL

SEQ ID NO: 185 - DNA, 1485 bp, synthetic construct
  misc_feature 1..1485: note = Variant of monoamine oxidase
  source 1..1485: mol_type = other DNA
atgaccagccgcgacggctatcagtggaccccggaaacgggtctgacccagggcgtaccgtccctgggtgtcatttcgccgccgactaacatcgaagataccgataaggacgggccttgggatgtcattgtcattgggggcgggtattgtgggctgaccgcaacccgtgatttaaccgtcgcagggttcaagacgctgctgctggaggcccgtgatcgtattggtggccgctcctggagcagtaatattgacggttacccgtatgagatgggtggcacttgggttcattggcatcaatctcacgtgtggcgtgaaatcacgcgttataaaatgcacaacgcgctgtctccatcatttaacttttcacgtggcgtgaatcacttccaactgcgtaccaatccgaccaccagtacgtacatgacgcacgaagcggaggatgaactgctgcgtagcgcattgcataaattcaccaatgtcgacggcactaatggccgtacagtgttgccgttcccacatgatatgttttatgtgccggaatttcgcaagtatgacgaaatgtcatattccgaacgcattgaccagatccgcgacgaactgtctttgaacgaacgctctagtttagaggctttcattttattatgtagcggtggcaccctggaaaactccagctttggtgaatttctgcattggtgggcaatgtcgggttacacgtatcagggctgtatggattgtttaatctcctataaatttaaggatggccagagtgcgttcgcgcgtcgcttctgggaagaagccgctggcactggccgtctgggctatgtctttggttgtccggtgcgttctgtggtgaacgaacgcgacgcagtacgtgttaccgcacgtgacggtcgcgaattcgcagcgaaacgtttggtttgcacgattccgctgaacgtattgagttctgttcattttagcccaccactgtccccgcaacgcatggccgctgcgaacattggccatgttaaccagtgcgtcaaagtgcatgcggaagtcagttgtccggatatgcgttcatggtcgggtatctcctatccgttcaacaaattagcctacgctatcggcgatggcacgaccccagcgggtaatacgcatattgtgtgccttgggggggcccataatcatatccagccggaaaaggacgtggaagcaacgaagatggccgttgaaaacatgtcgcctgggaatatggatatcaaacgtctggtcttccacaactggtgcaaggatgaatttgccaaaggcgcgtggttcttcgcccctccacagctgctgtcaaagagcctggatgaactgcgctgccgtcacggtaatgtcctgtttgcaaactccgattgggccttaggttggcgtggttttatcgatggtgctatcgaggagggcacccgcgcagcggttactgtaattgaggaactgcgtcctgcgcctgcggtgcgttcccacctg

SEQ ID NO: 186 - protein, 495 aa, synthetic construct
  REGION 1..495: note = Variant of monoamine oxidase
MTSRDGYQWTPETGLTQGVPSLGVISPPTNIEDTDKDGPWDVIVIGGGYCGLTATRDLTVAGFKTLLLEARDRIGGRSWSSNIDGYPYEMGGTWVHWHQSHVWREITRYKMHNALSPSFNFSRGVNHFQLRTNPTTSTYMTHEAEDELLRSALHKFTNVDGTNGRTVLPFPHDMFYVPEFRKYDEMSYSERIDQIRDELSLNERSSLEAFILLCSGGTLENSSFGEFLHWWAMSGYTYQGCMDCLISYKFKDGQSAFARRFWEEAAGTGRLGYVFGCPVRSVVNERDAVRVTARDGREFAAKRLVCTIPLNVLSSVHFSPPLSPQRMAAANIGHVNQCVKVHAEVSCPDMRSWSGISYPFNKLAYAIGDGTTPAGNTHIVCLGGAHNHIQPEKDVEATKMAVENMSPGNMDIKRLVFHNWCKDEFAKGAWFFAPPQLLSKSLDELRCRHGNVLFANSDWALGWRGFIDGAIEEGTRAAVTVIEELRPAPAVRSHL

SEQ ID NO: 187 - DNA, 1485 bp, synthetic construct
  misc_feature 1..1485: note = Variant of monoamine oxidase
  source 1..1485: mol_type = other DNA
atgaccagccgcgacggctatcagtggaccccggaaacgggtctgacccagggcgtaccgtccctgggtgtcatttcgccgccgactaacatcgaagataccgataaggacgggccttgggatgtcattgtcattgggggcgggtattgtgggctgaccgcaacccgtgatttaaccgtcgcagggttcaagacgctgctgctggaggcccgtgatcgtattggtggccgctcctggagcagtaatattgacggttacccgtatgagatgggtggcacttgggttcattggcatcaatctcacgtgtggcgtgaaatcacgcgttataaaatgcacaacgcgctgtctccatcatttaacttttcacgtggcgtgaatcacttccaactgcgtaccaatccgaccaccagtacgtacatgacgcacgaagcggaggatgaactgctgcgtagcgcattgcataaattcaccaatgtcgacggcactaatggccgtacagtgttgccgttcccacatgatatgttttatgtgccggaatttcgcaagtatgacgaaatgtcatattccgaacgcattgaccagatccgcgacgaactgtctttgaacgaacgctctagtttagaggctttcattttattatgtagcggtggcaccctggaaaactccagctttggtgaatttctgcattggtgggcaatgtcgggttacacgtatcagggctgtatggattgtttaatctcctataaatttaaggatggccagagtgcgttcgcgcgtcgcttctgggaagaagccgctggcactggccgtctgggctatgtctttggttgtccggtgcgttctgtggtgaacgaacgcgacgcagtacgtgttaccgcacgtgacggtcgcgaattcgcagcgaaacgtttggtttgcacgattccgctgaacgtattgagttctgttcattttagcccaccactgtccccgcaacgcatggccgctgcgaacattggccatgttaaccagtgcgtcaaagtgcatgcggaagtcagttgtccggatatgcgttcatggtcgggtatctcctatccgttcaacaaattagcctacgctatcggcgatggcacgaccccagcgggtaatacgcatattgtgtgccttgggggggcccataatcatatccagccggaagaggacgtggaagcaacgaagatggccgttgaaaacatgtcgcctgggaatatggatatcaaacgtctggtcttccacaactggtgcaaggatgaatttgccaaaggcgcgtggttcttcgcccctccacagctgctgtcaaagagcctggatgaactgcgctgccgtcacggtaatgtcctgtttgcaaactccgattgggccttaggttggcgtggttttatcgatggtgctatcgaggagggcattcgcgcagcggttactgtaattgaggaactgcgtcctgcgcctgcggtgcgttcccacctg

SEQ ID NO: 188 - protein, 495 aa, synthetic construct
  REGION 1..495: note = Variant of monoamine oxidase
MTSRDGYQWTPETGLTQGVPSLGVISPPTNIEDTDKDGPWDVIVIGGGYCGLTATRDLTVAGFKTLLLEARDRIGGRSWSSNIDGYPYEMGGTWVHWHQSHVWREITRYKMHNALSPSFNFSRGVNHFQLRTNPTTSTYMTHEAEDELLRSALHKFTNVDGTNGRTVLPFPHDMFYVPEFRKYDEMSYSERIDQIRDELSLNERSSLEAFILLCSGGTLENSSFGEFLHWWAMSGYTYQGCMDCLISYKFKDGQSAFARRFWEEAAGTGRLGYVFGCPVRSVVNERDAVRVTARDGREFAAKRLVCTIPLNVLSSVHFSPPLSPQRMAAANIGHVNQCVKVHAEVSCPDMRSWSGISYPFNKLAYAIGDGTTPAGNTHIVCLGGAHNHIQPEEDVEATKMAVENMSPGNMDIKRLVFHNWCKDEFAKGAWFFAPPQLLSKSLDELRCRHGNVLFANSDWALGWRGFIDGAIEEGIRAAVTVIEELRPAPAVRSHL

SEQ ID NO: 189 - DNA, 1485 bp, synthetic construct
  misc_feature 1..1485: note = Variant of monoamine oxidase
  source 1..1485: mol_type = other DNA
atgaccagccgcgacggctatcagtggaccccggaaacgggtctgacccagggcgtaccgtccctgggtgtcatttcgccgccgactaacatcgaagataccgataaggacgggccttgggatgtcattgtcattgggggcgggtattgtgggctgaccgcaacccgtgatttaaccgtcgcagggttcaagacgctgctgctggaggcccgtgatcgtattggtggccgctcctggagcagtaatattgacggttacccgtatgagatgggtggcacttgggttcattggcatcaatctcacgtgtggcgtgaaatcacgcgttataaaatgcacaacgcgctgtctccatcatttaacttttcacgtggcgtgaatcacttccaactgcgtaccaatccgaccaccagtacgtacatgacgcacgaagcggaggatgaactgctgcgtagcgcattgcatcttttcaccaatgtcgacggcactaatggccgtacagtgttgccgttcccacatgatatgttttatgtgccggaatttcgcaagtatgacgaaatgtcatattccgaacgcattgaccagatccgcgacgaactgtctttgaacgaacgctctagtttagaggctttcattttattatgtagcggtggcaccctggaaaactccagctttggtgaatttctgcattggtgggcaatgtcgggttacacgtatcagggctgtatggattgtttaatctcctataaatttaaggatggccagagtgcgttcgcgcgtcgcttctgggaagaagccgctggcactggccgtctgggctatgtctttggttgtccggtgcgttctgtggtgaacgaacgcgacgcagtacgtgttaccgcacgtgacggtcgcgaattcgcagcgaaacgtttggtttgcacgattccgctgaacgtattgagttctgttcattttagcccaccactgtccccgcaacgcatggccgctgcgaacattggccatgttaaccagtgcgtcaaagtgcatgcggaagtcagttgtccggatatgcgttcatggtcgggtatctcctatccgttcaacaaattagcctacgctatcggcgatggcacgaccccagcgggtaatacgcatattgtgtgccttgggggggcccataatcatatccagccggaagaggacgtggaagcaacgaagatggccgttgaaaacatgtcgcctgggaatatggatatcaaacgtctggtcttccacaactggtgcaaggatgaatttgccaaaggcgcgtggttcttcgcccctccacagctgctgtcaaagagcctggatgaactgcgctgccgtcacggtaatgtcctgtttgcaaactccgattgggccttaggttggcgtggttttatcgatggtgctatcgaggagggcacccgcgcagcggttactgtaattgaggaactgcgtcctgcgcctgcggtgcgttcccacctg

SEQ ID NO: 190 - protein, 495 aa, synthetic construct
  REGION 1..495: note = Variant of monoamine oxidase
MTSRDGYQWTPETGLTQGVPSLGVISPPTNIEDTDKDGPWDVIVIGGGYCGLTATRDLTVAGFKTLLLEARDRIGGRSWSSNIDGYPYEMGGTWVHWHQSHVWREITRYKMHNALSPSFNFSRGVNHFQLRTNPTTSTYMTHEAEDELLRSALHLFTNVDGTNGRTVLPFPHDMFYVPEFRKYDEMSYSERIDQIRDELSLNERSSLEAFILLCSGGTLENSSFGEFLHWWAMSGYTYQGCMDCLISYKFKDGQSAFARRFWEEAAGTGRLGYVFGCPVRSVVNERDAVRVTARDGREFAAKRLVCTIPLNVLSSVHFSPPLSPQRMAAANIGHVNQCVKVHAEVSCPDMRSWSGISYPFNKLAYAIGDGTTPAGNTHIVCLGGAHNHIQPEEDVEATKMAVENMSPGNMDIKRLVFHNWCKDEFAKGAWFFAPPQLLSKSLDELRCRHGNVLFANSDWALGWRGFIDGAIEEGTRAAVTVIEELRPAPAVRSHL

SEQ ID NO: 191 - DNA, 1485 bp, synthetic construct
  misc_feature 1..1485: note = Variant of monoamine oxidase
  source 1..1485: mol_type = other DNA
atgaccagccgcgacggctatcagtggaccccggaaacgggtctgacccagggcgtaccgtccctgggtgtcatttcgccgccgactaacatcgaggataccgataaggacgggccttgggatgtcattgtcattgggggcgggtattgtgggctgaccgcaacccgtgatttaaccgtcgcagggttcaagacgctgctgctggaggcccgtgatcgtattggtggccgctcctggagcagtaatattgacggttacccgtatgagatgggtggcacttgggttcattggcatcaatctcacgtgtggcgtgaaatcacgcgttataaaatgcacaacgcgctgtctccatcatttaacttttcacgtggcgtgaatcacttccaactgcgtaccaatccgactaccagtacgtacatgacgcacgaagcggaggatgaactgctgcgtagcgcattgcataaattcaccaatgtcgacggcactaatggccgtacagtgttgccgttcccacatgatatgttttatgtgccggaatttcgcaagtatgacgaaatgtcatattccgaacgcattgaccagatccgcgacgaactgtctttgaacgaacgctctagtttagaggctttcattttattatgtagcggtggcaccctggaaaactccagctttggtgaatttctgcattggtgggcaatgtcgggttacacgtatcagggctgtatggattgtttaatgtcctataaatttaaggatggccagagtgcgttcgcgcgtcgcttctgggaagaagccgctggcactggccgtctgggctatgtctttggttgtccggtgcgttctgtggtgaacgaacgcgacgcagtacgtgttaccgcacgtgacggtcgcgaattcgcagcgaaacgtttggtttgcacgattccgctgaacgtattgagttctgttcattttagcccaccactgtccccgcaacgcatggccgctgcgaacattggccatgttaaccagtgcgtcaaagtgcatgcggaagtcagttgtccggatatgcgttcatggtcgggtatctcctatccgttcaacaaattagcctacgctatcggcgatggcacgaccccagcgggtaatacgcatattgtgtgccttgggggggcgcataatcatatccagccggaagaggacgtggaagcaacgaagatggccgttgaaaacatgtcgcctgggaatatggatatcaaacgtctggtcttccacaactggtgcaaggatgaatttgccaaaggcgcgtggttcttcgcccctccacagctgctgtcaaagagcctggatgaactgcgctgccgtcacggtaatgtcctgtttgcaaactccgattgggccttaggttggcgtggttttatcgatggtgctatcgaggagggcacccgcgcagcggttactgtaattgaggaactgcgtcctgcgcctgcggtgcgttcccacctg

SEQ ID NO: 192 - protein, 495 aa, synthetic construct
  REGION 1..495: note = Variant of monoamine oxidase
MTSRDGYQWTPETGLTQGVPSLGVISPPTNIEDTDKDGPWDVIVIGGGYCGLTATRDLTVAGFKTLLLEARDRIGGRSWSSNIDGYPYEMGGTWVHWHQSHVWREITRYKMHNALSPSFNFSRGVNHFQLRTNPTTSTYMTHEAEDELLRSALHKFTNVDGTNGRTVLPFPHDMFYVPEFRKYDEMSYSERIDQIRDELSLNERSSLEAFILLCSGGTLENSSFGEFLHWWAMSGYTYQGCMDCLMSYKFKDGQSAFARRFWEEAAGTGRLGYVFGCPVRSVVNERDAVRVTARDGREFAAKRLVCTIPLNVLSSVHFSPPLSPQRMAAANIGHVNQCVKVHAEVSCPDMRSWSGISYPFNKLAYAIGDGTTPAGNTHIVCLGGAHNHIQPEEDVEATKMAVENMSPGNMDIKRLVFHNWCKDEFAKGAWFFAPPQLLSKSLDELRCRHGNVLFANSDWALGWRGFIDGAIEEGTRAAVTVIEELRPAPAVRSHL

SEQ ID NO: 193 - DNA, 1485 bp, synthetic construct
  misc_feature 1..1485: note = Variant of monoamine oxidase
  source 1..1485: mol_type = other DNA
atgaccagccgcgacggctatcagtggaccccggaaacgggtctgacccagggcgtaccgtccctgggtgtcatttcgccgccgactaacatcgaagataccgataaggacgggccttgggatgtcattgtcattgggggcgggtattgtgggctgaccgcaacccgtgatttaaccgtcgcagggttcaagacgctgctgctggaggcccgtgatcgtattggtggccgctcctggagcagtaatattgacggttacccgtatgagatgggtggcacttgggttcattggcatcaatctcacgtgtggcgtgaaatcacgcgttataaaatgcacaacgcgctgtctccatcatttaacttttcacgtggcgtgaatcacttccaactgcgtaccaatccgaccaccagtacgtacatgacgcacgaagcggaggatgaactgctgcgtagcgcattgcataaattcaccaatgtcgacggcactaatggccgtacagtgttgccgttcccacatgatactttttatgtgccggaatttcgcaagtatgacgaaatgtcatattccgaacgcattgaccagatccgcgacgaactgtctttgaacgaacgctctagtttagaggctttcattttattatgtagcggtggcaccctggaaaactccagctttggtgaatttctgcattggtgggcaatgtcgggttacacgtatcagggctgtatggattgtttaatctcctataaatttaaggatggccagagtgcgttcgcgcgtcgcttctgggaagaagccgctggcactggccgtctgggctatgtctttggttgtccggtgcgttctgtggtgaacgaacgcgacgcagtacgtgttaccgcacgtgacggtcgcgaattcgcagcgaaacgtttggtttgcacgattccgctgaacgtattgagttctgttcattttagcccaccactgtccccgcaacgcatggccgctgcgaacattggccatgttaaccagtgcgtcaaagtgcatgcggaagtcagttgtccggatatgcgttcatggtcgggtatctcctatccgttcaacaaattagcctacgctatcggcgatggcacgaccccagcgggtaatacgcatattgtgtgccttgggggggcccataatcatatccagccggaagaggacgtggaagcaacgaagatggccgttgaaaacatgtcgcctgggaatatggatatcaaacgtctggtcttccacaactggtgcaaggatgaatttgccaaaggcgcgtggttcttcgcccctccacagctgctgtcaaagagcctggatgaactgcgctgccgtcacggtaatgtcctgtttgcaaactccgattgggccttaggttggcgtggttttatcgatggtgctatcgaggagggcacccgcgcagcggttactgtaattgaggaactgcgtcctgcgcctgcggtgcgttcccacctg

SEQ ID NO: 194 - protein, 495 aa, synthetic construct
  REGION 1..495: note = Variant of monoamine oxidase
MTSRDGYQWTPETGLTQGVPSLGVISPPTNIEDTDKDGPWDVIVIGGGYCGLTATRDLTVAGFKTLLLEARDRIGGRSWSSNIDGYPYEMGGTWVHWHQSHVWREITRYKMHNALSPSFNFSRGVNHFQLRTNPTTSTYMTHEAEDELLRSALHKFTNVDGTNGRTVLPFPHDTFYVPEFRKYDEMSYSERIDQIRDELSLNERSSLEAFILLCSGGTLENSSFGEFLHWWAMSGYTYQGCMDCLISYKFKDGQSAFARRFWEEAAGTGRLGYVFGCPVRSVVNERDAVRVTARDGREFAAKRLVCTIPLNVLSSVHFSPPLSPQRMAAANIGHVNQCVKVHAEVSCPDMRSWSGISYPFNKLAYAIGDGTTPAGNTHIVCLGGAHNHIQPEEDVEATKMAVENMSPGNMDIKRLVFHNWCKDEFAKGAWFFAPPQLLSKSLDELRCRHGNVLFANSDWALGWRGFIDGAIEEGTRAAVTVIEELRPAPAVRSHL

SEQ ID NO: 195 - DNA, 1485 bp, synthetic construct
  misc_feature 1..1485: note = Variant of monoamine oxidase
  source 1..1485: mol_type = other DNA
atgaccagccgcgacggctatcagtggaccccggaaacgggtctgacccagggcgtaccgtccctgggtgtcatttcgccgccgactaacatcgaagataccgataaggacgggccttgggatgtcattgtcattgggggcgggtattgtgggctgaccgcaacccgtgatttaaccgtcgcagggttcaagacgctgctgctggaggcccgtgatcgtattggtggccgctcctggagcagtaatattgacggttacccgtatgagatgggtggcacttgggttcattggcatcaatctcacgtgtggcgtgaaatcacgcgttataaaatgcacaacgcgctgtctccatcatttaacttttcacgtggcgtgaatcacttccaactgcgtaccaatccgaccaccagtacgtacatgacgcacgaagcggaggatgaactgctgcgtagcgcattgcataaattcaccaatgtcgacggcactaatggccgtacagtgttgccgttcccacatgatatgttttatgtgccggaatttcgcaagtatgacgaaatgtcatattccgaacgcattgaccagatccgcgacgaactgtctttgaacgaacgctctagtttagaggctttcattttattatgtagcggtggcaccctggaaaactccagctttggtgaatttctgcattggtgggcaatgtcgggttacacgtatcagggctgtatggattgtttaatctcctataaatttaaggatggccagagtgcgttcgcgcgttttttctgggaagaagccgctggcactggccgtctgggctatgtctttggttgtccggtgcgttctgtggtgaacgaacgcgacgcagtacgtgttaccgcacgtgacggtcgcgaattcgcagcgaaacgtttggtttgcacgattccgctgaacgtattgagttctgttcattttagcccaccactgtccccgcaacgcatggccgctgcgaacattggccatgttaaccagtgcgtcaaagtgcatgcggaagtcagttgtccggatatgcgttcatggtcgggtatctcctatccgttcaacaaattagcctacgctatcggcgatggcacgaccccagcgggtaatacgcatattgtgtgccttgggggggcccataatcatatccagccggaagaggacgtggaagcaacgaagatggccgttgaaaacatgtcgcctgggaatatggatatcaaacgtctggtcttccacaactggtgcaaggatgaatttgccaaaggcgcgtggttcttcgcccctccacagctgctgtcaaagagcctggatgaactgcgctgccgtcacggtaatgtcctgtttgcaaactccgattgggccttaggttggcgtggttttatcgatggtgctatcgaggagggcacccgcgcagcggttactgtaattgaggaactgcgtcctgcgcctgcggtgcgttcccacctg

SEQ ID NO: 196 - protein, 495 aa, synthetic construct
  REGION 1..495: note = Variant of monoamine oxidase
MTSRDGYQWTPETGLTQGVPSLGVISPPTNIEDTDKDGPWDVIVIGGGYCGLTATRDLTVAGFKTLLLEARDRIGGRSWSSNIDGYPYEMGGTWVHWHQSHVWREITRYKMHNALSPSFNFSRGVNHFQLRTNPTTSTYMTHEAEDELLRSALHKFTNVDGTNGRTVLPFPHDMFYVPEFRKYDEMSYSERIDQIRDELSLNERSSLEAFILLCSGGTLENSSFGEFLHWWAMSGYTYQGCMDCLISYKFKDGQSAFARFFWEEAAGTGRLGYVFGCPVRSVVNERDAVRVTARDGREFAAKRLVCTIPLNVLSSVHFSPPLSPQRMAAANIGHVNQCVKVHAEVSCPDMRSWSGISYPFNKLAYAIGDGTTPAGNTHIVCLGGAHNHIQPEEDVEATKMAVENMSPGNMDIKRLVFHNWCKDEFAKGAWFFAPPQLLSKSLDELRCRHGNVLFANSDWALGWRGFIDGAIEEGTRAAVTVIEELRPAPAVRSHL

SEQ ID NO: 197 - DNA, 1485 bp, synthetic construct
  misc_feature 1..1485: note = Variant of monoamine oxidase
  source 1..1485: mol_type = other DNA
atgaccagccgcgacggctatcagtggaccccggaaacgggtctgacccagggcgtaccgtccctgggtgtcatttcgccgccgactaacatcgaagataccgataaggacgggccttgggatgtcattgtcattgggggcgggtattgtgggctgaccgcaacccgtgatttaaccgtcgcagggttcaagacgctgctgctggaggcccgtgatcgtattggtggccgctcctggagcagtaatattgacggttacccgtatgagatgggtggcacttgggttcattggcatcaatctcacgtgtggcgtgaaatcacgcgttataaaatgcacaacgcgctgtctccatcatttaacttttcacgtggcgtgaatcacttccaactgcgtaccaatccgaccaccagtacgtacatgacgcacgaagcggaggatgaactgctgcgtagcgcattgcataaattcaccaatgtcgacggcactaatggccgtacagtgttgccgttcccacatgatatgttttatgtgccggaatttcgcaagtatgacgaaatgtcatattccgaacgcattgaccagatccgcgacgaactgtctttgaacgaacgctctagtttagaggctttcattttattatgtagcggtggcaccctggaaaactccagctttggtgaatttctgcattggtgggcaatgtcgggttacacgtatcagggctgtatggattgtttaatctcctataaatttaaggatggccagagtgcgttcgcgcgtcgcttctgggaagaagccgctggcactggccgtctgggctatgtctttggttgtccggtgcgttctgtggtgaacgaacgcgacgcagtacgtgttaccgcacgtgacggtcgcgaattcgcagcgaaacgtttggtttgcacgattccgctgaacgtattgagttctgttcattttagcccaccactgtccccgcaacgcatggccgctgcgaacattggccatgttaaccagtgcgtcaaagtgcatgcggaagtcagttgtccggatatgcgttcatggtcgggtatctcctatccgttcaacaaattagcctacgctatcggcgatggcacgaccccagcgggtaatacgcatattgtgtgccttgggggggcccataatcatatccagccgggtgaggacgtggaagcaacgaagatggccgttgaaaacatgtcgcctgggaatatggatatcaaacgtctggtcttccacaactggtgcaaggatgaatttgccaaaggcgcgtggttcttcgcccctccacagctgctgtcaaagagcctggatgaactgcgctgccgtcacggtaatgtcctgtttgcaaactccgattgggccttaggttggcgtggttttatcgatggtgctatcgaggagggcacccgcgcagcggttactgtaattgaggaactgcgtcctgcgcctgcggtgcgttcccacctg

SEQ ID NO: 198 - protein, 495 aa, synthetic construct
  REGION 1..495: note = Variant of monoamine oxidase
MTSRDGYQWTPETGLTQGVPSLGVISPPTNIEDTDKDGPWDVIVIGGGYCGLTATRDLTVAGFKTLLLEARDRIGGRSWSSNIDGYPYEMGGTWVHWHQSHVWREITRYKMHNALSPSFNFSRGVNHFQLRTNPTTSTYMTHEAEDELLRSALHKFTNVDGTNGRTVLPFPHDMFYVPEFRKYDEMSYSERIDQIRDELSLNERSSLEAFILLCSGGTLENSSFGEFLHWWAMSGYTYQGCMDCLISYKFKDGQSAFARRFWEEAAGTGRLGYVFGCPVRSVVNERDAVRVTARDGREFAAKRLVCTIPLNVLSSVHFSPPLSPQRMAAANIGHVNQCVKVHAEVSCPDMRSWSGISYPFNKLAYAIGDGTTPAGNTHIVCLGGAHNHIQPGEDVEATKMAVENMSPGNMDIKRLVFHNWCKDEFAKGAWFFAPPQLLSKSLDELRCRHGNVLFANSDWALGWRGFIDGAIEEGTRAAVTVIEELRPAPAVRSHL

SEQ ID NO: 199 - DNA, 1485 bp, synthetic construct
  misc_feature 1..1485: note = Variant of monoamine oxidase
  source 1..1485: mol_type = other DNA
atgaccagccgcgacggctatcagtggaccccggaaacgggtctgacccagggcgtaccgtccctgggtgtcatttcgccgccgactaacatcggggataccgataaggacgggccttgggatgtcattgtcattgggggcgggtattgtgggctgaccgcaacccgtgatttaaccgtcgcagggttcaaggtactgctgctggaggcccgtgatcgtattggtggccgctcctggagcagtaatattgacggttacccgtatgagatgggtggcacttgggttcattggcatcaatctcacgtgtggcgtgaaatcacgcgttataaaatgcacaacgcgctgtctccatcatttaacttttcacgtggcgtgaatcacttccaactgcgtaccaatccgcaaaccagtacgtacatgacgcacgaagcggaggatgaactgctgcgtagcgcattgcataaattcaccaatgtcgacggcactaatggccgtacagtgttgccgttcccacatgatatgttttatgtgccggaatttcgcaagtatgacgaaatgtcatattccgaacgcattgaccagatccgcgacgaactgtctttgaacgaacgctctagtttagaggctttcattttattatgtagcggtggcaccctggaaaactccagctttggtgaatttctgcattggtgggcaatgtcgggttacacgtatcagggctgtatggattgtttaatgtcctataaatttaaggatggccagagtgcgttcgcgcgtcgcttctgggaagaagccgctggcactggccgtctgggctatgtctttggttgtccggtgcgttctgtggtggacgaacgcgacgcagtacgtgttaccgcacgtgacggtcgcgaattcgcagcgaaacgtttggtttgcacgattccgctgaacgtattgagttctgttcattttagcccaccactgtccccgcaacgcatggccgctgcgaacattggccatgttaatcagtgcgtcaaagtgcatgcggaagtcagttgtccggatatgcgttcatggtcgggtatctcctatccgttcaacaaattagcctacgctatcggcgatggcacgaccccagcgggtaatacgcatattgtgtgccttgggggggcgcataatcatatccagccggaagaggacgtggaagcaacgaagatggccgttgaaaacatgtcgcctgggaatatggatatcaaacgtctggtcttccacaactggtgcaaggatgaatttgccaaaggcgcgtggttcttcgcccctccacagctgctgtcaaagagcctggatgaactgcgctgccgtcacggtaatgtcctgtttgcaaactccgattgggccttaggttggcgtggttttatcgatggtgctatcgaggagggcacccgcgcagcggttactgtaattgaggaactgcgtcctgcgcctgcggtgcgttcccacctg

SEQ ID NO: 200 - protein, 495 aa, synthetic construct
  REGION 1..495: note = Variant of monoamine oxidase
MTSRDGYQWTPETGLTQGVPSLGVISPPTNIGDTDKDGPWDVIVIGGGYCGLTATRDLTVAGFKVLLLEARDRIGGRSWSSNIDGYPYEMGGTWVHWHQSHVWREITRYKMHNALSPSFNFSRGVNHFQLRTNPQTSTYMTHEAEDELLRSALHKFTNVDGTNGRTVLPFPHDMFYVPEFRKYDEMSYSERIDQIRDELSLNERSSLEAFILLCSGGTLENSSFGEFLHWWAMSGYTYQGCMDCLMSYKFKDGQSAFARRFWEEAAGTGRLGYVFGCPVRSVVDERDAVRVTARDGREFAAKRLVCTIPLNVLSSVHFSPPLSPQRMAAANIGHVNQCVKVHAEVSCPDMRSWSGISYPFNKLAYAIGDGTTPAGNTHIVCLGGAHNHIQPEEDVEATKMAVENMSPGNMDIKRLVFHNWCKDEFAKGAWFFAPPQLLSKSLDELRCRHGNVLFANSDWALGWRGFIDGAIEEGTRAAVTVIEELRPAPAVRSHL

SEQ ID NO: 201 - DNA, 1485 bp, synthetic construct
  misc_feature 1..1485: note = Variant of monoamine oxidase
  source 1..1485: mol_type = other DNA
atgaccagccgcgacggctatcagtggaccccggaaacgggtctgacccagggcgtaccgtccctgggtgtcatttcgccgccgactaacatcgaagataccgataaggacgggccttgggatgtcattgtcattgggggcgggtattgtgggctgaccgcaacccgtgatttaaccgtcgcagggttcaagacgctgctgctggaggcccgtgatcgtattggtggccgctcctggagcagtaatattgacggttacccgtatgagatgggtggcacttgggttcattggcatcaatctcacgtgtggcgtgaaatcacgcgttataaaatgcacaacgcgctgtctccatcatttaacttttcacgtggcgtgaatcacttccaactgcgtaccaatccgaccaccagtacgtacatgacgcacgaagcggaggatgaactgctgcgtagcgcattgcataaattcaccaatgtcgacggcactaatggccgtacagtgttgccgttcccacatgatatgttttatgtgccggaatttcgcaagtatgacgggatgtcatattccgaacgcattgaccagatccgcgacgaactgtctttgaacgaacgctctagtttagaggctttcattttattatgtagcggtggcaccctggaaaactccagctttggtgaatttctgcattggtgggcaatgtcgggttacacgtatcagggctgtatggattgtttaatctcctataaatttaaggatggccagagtgcgttcgcgcgtcgcttctgggaagaagccgctggcactggccgtctgggctatgtctttggttgtccggtgcgttctgtggtgaacgaacgcgacgcagtacgtgttaccgcacgtgacggtcgcgaattcgcagcgaaacgtttggtttgcacgattccgctgaacgtattgagttctgttcattttagcccaccactgtccccgcaacgcatggccgctgcgaacattggccatgttaaccagtgcgtcaaagtgcatgcggaagtcagttgtccggatatgcgttcatggtcgggtatctcctatccgttcaacaaattagcctacgctatcggcgatggcacgaccccagcgggtaatacgcatattgtgtgccttgggggggcccataatcatatccagccggaagaggacgtggaagcaacgaagatggccgttgaaaacatgtcgcctgggaatatggatatcaaacgtctggtcttccacaactggtgcaaggatgaatttgccaaaggcgcgtggttcttcgcccctccacagctgctgtcaaagagcctggatgaactgcgctgccgtcacggtaatgtcctgtttgcaaactccgattgggccttaggttggcgtggttttatcgatggtgctatcgaggagggcacccgcgcagcggttactgtaattgaggaactgcgtcctgcgcctgcggtgcgttcccacctg

SEQ ID NO: 202 - protein, 495 aa, synthetic construct
  REGION 1..495: note = Variant of monoamine oxidase
MTSRDGYQWTPETGLTQGVPSLGVISPPTNIEDTDKDGPWDVIVIGGGYCGLTATRDLTVAGFKTLLLEARDRIGGRSWSSNIDGYPYEMGGTWVHWHQSHVWREITRYKMHNALSPSFNFSRGVNHFQLRTNPTTSTYMTHEAEDELLRSALHKFTNVDGTNGRTVLPFPHDMFYVPEFRKYDGMSYSERIDQIRDELSLNERSSLEAFILLCSGGTLENSSFGEFLHWWAMSGYTYQGCMDCLISYKFKDGQSAFARRFWEEAAGTGRLGYVFGCPVRSVVNERDAVRVTARDGREFAAKRLVCTIPLNVLSSVHFSPPLSPQRMAAANIGHVNQCVKVHAEVSCPDMRSWSGISYPFNKLAYAIGDGTTPAGNTHIVCLGGAHNHIQPEEDVEATKMAVENMSPGNMDIKRLVFHNWCKDEFAKGAWFFAPPQLLSKSLDELRCRHGNVLFANSDWALGWRGFIDGAIEEGTRAAVTVIEELRPAPAVRSHL

SEQ ID NO: 203 - DNA, 1485 bp, synthetic construct
  misc_feature 1..1485: note = Variant of monoamine oxidase
  source 1..1485: mol_type = other DNA
atgaccagccgcgacggctatcagtggaccccggaaacgggtctgacccagggcgtaccgtccctgggtgtcatttcgccgccgactaacatcgaagataccgataaggacgggccttgggatgtcattgtcattgggggcgggtattgtgggctgaccgcaacccgtgatttaaccgtcgcagggttcaagacgctgctgctggaggcccgtgatcgtattggtggccgctcctggagcagtaatattgacggttacccgtatgagatgggtggcacttgggttcattggcatcaatctcacgtgtggcgtgaaatcacgcgttataaaatgcacaacgcgctgtctccatcatttaacttttcacgtggcgtgaatcacttccaactgcgtaccaatccgaccaccagtacgtacatgacgcacgaagcggaggatgaactgctgcgtagcgcattgcataaattcaccaatgtcgacggcactaatggccgtacagtgttgccgttcccacatgatatgttttatgtgccggaatttcgcaagtatgacgaaatgtcatattccgaacgcattgaccagatccgcgacgaactgtctttgaacgaacgctctagtttatctgctttcattttattatgtagcggtggcaccctggaaaactccagctttggtgaatttctgcattggtgggcaatgtcgggttacacgtatcagggctgtatggattgtttaatctcctataaatttaaggatggccagagtgcgttcgcgcgtcgcttctgggaagaagccgctggcactggccgtctgggctatgtctttggttgtccggtgcgttctgtggtgaacgaacgcgacgcagtacgtgttaccgcacgtgacggtcgcgaattcgcagcgaaacgtttggtttgcacgattccgctgaacgtattgagttctgttcattttagcccaccactgtccccgcaacgcatggccgctgcgaacattggccatgttaaccagtgcgtcaaagtgcatgcggaagtcagttgtccggatatgcgttcatggtcgggtatctcctatccgttcaacaaattagcctacgctatcggcgatggcacgaccccagcgggtaatacgcatattgtgtgccttgggggggcccataatcatatccagccggaagaggacgtggaagcaacgaagatggccgttgaaaacatgtcgcctgggaatatggatatcaaacgtctggtcttccacaactggtgcaaggatgaatttgccaaaggcgcgtggttcttcgcccctccacagctgctgtcaaagagcctggatgaactgcgctgccgtcacggtaatgtcctgtttgcaaactccgattgggccttaggttggcgtggttttatcgatggtgctatcgaggagggcacccgcgcagcggttactgtaattgaggaactgcgtcctgcgcctgcggtgcgttcccacctg

SEQ ID NO: 204 - protein, 495 aa, synthetic construct
  REGION 1..495: note = Variant of monoamine oxidase
MTSRDGYQWTPETGLTQGVPSLGVISPPTNIEDTDKDGPWDVIVIGGGYCGLTATRDLTVAGFKTLLLEARDRIGGRSWSSNIDGYPYEMGGTWVHWHQSHVWREITRYKMHNALSPSFNFSRGVNHFQLRTNPTTSTYMTHEAEDELLRSALHKFTNVDGTNGRTVLPFPHDMFYVPEFRKYDEMSYSERIDQIRDELSLNERSSLSAFILLCSGGTLENSSFGEFLHWWAMSGYTYQGCMDCLISYKFKDGQSAFARRFWEEAAGTGRLGYVFGCPVRSVVNERDAVRVTARDGREFAAKRLVCTIPLNVLSSVHFSPPLSPQRMAAANIGHVNQCVKVHAEVSCPDMRSWSGISYPFNKLAYAIGDGTTPAGNTHIVCLGGAHNHIQPEEDVEATKMAVENMSPGNMDIKRLVFHNWCKDEFAKGAWFFAPPQLLSKSLDELRCRHGNVLFANSDWALGWRGFIDGAIEEGTRAAVTVIEELRPAPAVRSHL

SEQ ID NO: 205 - DNA, 1485 bp, synthetic construct
  misc_feature 1..1485: note = Variant of monoamine oxidase
  source 1..1485: mol_type = other DNA
atgaccagccgcgacggctatcagtggaccccggaaacgggtctgacccagggcgtaccgtccctgggtgtcatttcgccgccgactaacatcgaagataccgataaggacgggccttgggatgtcattgtcattggggcggggtattgtgggctgaccgcaacccgtgatttaaccgtcgcagggttcaagacgctgctgctggaggcccgtgatcgtattggtggccgctcctggagcagtaatattgacggttacccgtatgagatgggtggcacttgggttcattggcatcaatctcacgtgtggcgtgaaatcacgcgttataaaatgcacaacgcgctgtctccatcatttaacttttcacgtggcgtgaatcacttccaactgcgtaccaatccgaccaccagtacgtacatgacgcacgaagcggaggatgaactgctgcgtagcgcattgcataaattcaccaatgtcgacggcactaatggccgtacagtgttgccgttcccacatgatatgttttatgtgccggaatttcgcaagtatgacgaaatgtcatattccgaacgcattgaccagatccgcaacgaactgtctttgaacgaacgctctagtttagaggctttcattttattatgtagcggtggcaccctggaaaactccagctttggtgaatttctgcattggtgggcaatgtcgggttacacgtatcagggctgtatggattgtttaatctcctataaatttaaggatggccagagtgcgttcgcgcgtcgcttctgggaagaagccgcaggcactggccgtctgggctatgtctttggttgtccggtgcgttctgtggtgaacgaacgcgacgcagtacgtgttaccgcacgtgacggtcgcgaattcgcagcgaaacgtttggtttgcacgattccgctgaacgtattgagttctgttcattttagcccaccactgtccccgcaacgcatggccgctgcgaacattggccatgttaaccagtgcgtcaaagtgcatgcggaagtcagttgtccggatatgcgttcatggtcgggtatctcctatccgttcaacaaattagcctacgctatcggcgatggcacgaccccagcgggtaatacgcatattgtgtgccttgggggggcccataatcatatccagccggaagaggacgtggaagcaacgaagatggccgttgaaaacatgtcgcctgggaatatggatatcaaacgtctggtcttccacaactggtgcaaggatgaatttgccaaaggcgcgtggttcttcgcccctccacagctgctgtcaaagagcctggatgaactgcgctgccgtcacggtaatgtcctgtttgcaaactccgattgggccttaggttggcgtggttttatcgatggtgctatcgaggagggcacccgcgcagcggttactgtaattgaggaactgcgtcctgcgcctgcggtgcgttcccacctg

SEQ ID NO: 206 - protein, 495 aa, synthetic construct
  REGION 1..495: note = Variant of monoamine oxidase
MTSRDGYQWTPETGLTQGVPSLGVISPPTNIEDTDKDGPWDVIVIGAGYCGLTATRDLTVAGFKTLLLEARDRIGGRSWSSNIDGYPYEMGGTWVHWHQSHVWREITRYKMHNALSPSFNFSRGVNHFQLRTNPTTSTYMTHEAEDELLRSALHKFTNVDGTNGRTVLPFPHDMFYVPEFRKYDEMSYSERIDQIRNELSLNERSSLEAFILLCSGGTLENSSFGEFLHWWAMSGYTYQGCMDCLISYKFKDGQSAFARRFWEEAAGTGRLGYVFGCPVRSVVNERDAVRVTARDGREFAAKRLVCTIPLNVLSSVHFSPPLSPQRMAAANIGHVNQCVKVHAEVSCPDMRSWSGISYPFNKLAYAIGDGTTPAGNTHIVCLGGAHNHIQPEEDVEATKMAVENMSPGNMDIKRLVFHNWCKDEFAKGAWFFAPPQLLSKSLDELRCRHGNVLFANSDWALGWRGFIDGAIEEGTRAAVTVIEELRPAPAVRSHL

SEQ ID NO: 207 - DNA, 1485 bp, synthetic construct
  misc_feature 1..1485: note = Variant of monoamine oxidase
  source 1..1485: mol_type = other DNA
atgaccagccgcgacggctatcagtggaccccggaaacgggtctgacccagggcgtaccgtccctgggtgtcatttcgccgccgactaacatcgaagataccgataaggacgggccttgggatgtcattgtcattgggggcgggtattgtgggctgaccgcaacccgtgatttaaccgtcgcagggttcaagacgctgctgctggaggcccgtgatcgtattggtggccgctcctggagcagtaatattgacggttacccgtatgagatgggtggcacttgggttcattggcatcaatctcacgtgtggcgtgaaatcacgcgttataaaatgcacaacgcgctgtctatctcatttaacttttcacgtggcgtgaatcacttccaactgcgtaccaatccgaccaccagtacgtacatgacgcacgaagcggaggatgaactgctgcgtagcgcattgcataaattcaccaatgtcgacggcactaatggccgtacagtgttgccgttcccacatgatatgttttatgtgccggaatttcgcaagtatgacgaaatgtcatattccgaacgcattgaccagatccgcgacgaactgtctttgaacgaacgctctagtttagaggctttcattttattatgtagcggtggcaccctggaaaactccagctttggtgaatttctgcattggtgggcaatgtcgggttacacgtatcagggctgtatggattgtttaatctcctataaatttaaggatggccagagtgcgttcgcgcgtcgcttctgggaagaagccgctggcactggccgtctgggctatgtctttggttgtccggtgcgttctgtggtgaacgaacgcgacgcagtacgtgttaccgcacgtgacggtcgcgaattcgcagcgaaacgtttggtttgcacgattccgctgaacgtattgagttctgttcattttagcccaccactgtccccgcaacgcatggccgctgcgaacattggccatgttaaccagtgcgtcaaagtgcatgcggaagtcagttgtccggatatgcgttcatggtcgggtatctcctatccgttcaacaaattagcctacgctatcggcgatggcacgaccccagcgggtaatacgcatattgtgtgccttgggggggcccataatcatatccagccggaagaggacgtggaagcaacgaagatggccgttgaaaacatgtcgcctgggaatatggatatcaaacgtctggtcttccacaactggtgcaaggatgaatttgccaaaggcgcgtggttcttcgcccctccacagctgctgtcaaagagcctggatgaactgcgctgccgtcacggtaatgtcctgtttgcaaactccgattgggccttaggttggcgtggttttatcgatggtgctatcgaggagggcacccgcgcagcggttactgtaattgaggaactgcgtcctgcgcctgcggtgcgttcccacctg

SEQ ID NO: 208 - protein, 495 aa, synthetic construct
  REGION 1..495: note = Variant of monoamine oxidase
MTSRDGYQWTPETGLTQGVPSLGVISPPTNIEDTDKDGPWDVIVIGGGYCGLTATRDLTVAGFKTLLLEARDRIGGRSWSSNIDGYPYEMGGTWVHWHQSHVWREITRYKMHNALSISFNFSRGVNHFQLRTNPTTSTYMTHEAEDELLRSALHKFTNVDGTNGRTVLPFPHDMFYVPEFRKYDEMSYSERIDQIRDELSLNERSSLEAFILLCSGGTLENSSFGEFLHWWAMSGYTYQGCMDCLISYKFKDGQSAFARRFWEEAAGTGRLGYVFGCPVRSVVNERDAVRVTARDGREFAAKRLVCTIPLNVLSSVHFSPPLSPQRMAAANIGHVNQCVKVHAEVSCPDMRSWSGISYPFNKLAYAIGDGTTPAGNTHIVCLGGAHNHIQPEEDVEATKMAVENMSPGNMDIKRLVFHNWCKDEFAKGAWFFAPPQLLSKSLDELRCRHGNVLFANSDWALGWRGFIDGAIEEGTRAAVTVIEELRPAPAVRSHL

SEQ ID NO: 209 - DNA, 1485 bp, synthetic construct
  misc_feature 1..1485: note = Variant of monoamine oxidase
  source 1..1485: mol_type = other DNA
atgaccagccgcgacggctatcagtggaccccggaaacgggtctgacccagggcgtaccgtccctgggtgtcatttcgccgccgactaacatcgaagataccgataaggacgggccttgggatgtcattgtcattgggggcgggtattgtgggctgaccgcaacccgtgatttaaccgtcgcagggttcaagacgctgctgctggaggcccgtgatcgtattggtggccgctcctggagcagtaatattgacggttacccgtatgagatgggtggcacttgggttcattggcatcaatctcacgtgtggcgtgaaatcacgcgttataaaatgcacaacgcgctgtctccatcatttaacttttcacgtggcgtgaatcacttccaactgcgtaccaatccgaccaccagtacgtacatgacgcacgaagcggaggatgaactgctgcgtagcgcattgcataaattcaccaatgtcgacggcactaatggccgtacagtgttgccgttcccacatgatatgttttatgtgccggaatttcgcaagtatgacgaaatgtcatattccgaacgcattgaccagatccgcgacgaactgtctttgaacgaacgctctagtttagaggctttcattttattatgtagcggtggcaccctggaaaactccagctttggtgaatttctgcattggtgggcaatgtcgggttacacgtatcagggctgtatggattgtttaatctcctataaatttaaggatggccagagtgcgttcgcgcgtcgcttctgggaagaagccgctggcactggccgtctgggctatgtctttggttgtccggtgcgttctgtggtgaacgaacgcgacgcagtacgtgttaccgcacgtgacggtcgcgaattcgcagcgaaacgtttggtttgcacgattccgctgaacgtattgagttctgttcattttagcccaccactgtccccgcaacgcatggccgctgcgaacattggccatgttaaccagtgcgtcaaagtgcatgcggaagtcagttgtccggatatgcgttcatggtcgggtatctcctatccgttcaacaaattagcctacgctatcggcgatggcacgaccccagcgggtaatacgcatattgtgtgccttgggggggcccatcagcatatccagccggaagaggacgtggaagcaacgaagatggccgttgaaaacatgtcgcctgggaatatggatatcaaacgtctggtcttccacaactggtgcaaggatgaatttgccaaaggcgcgtggttcttcgcccctccacagctgctgtcaaagagcctggatgaactgcgctgccgtcacggtaatgtcctgtttgcaaactccgattgggccttaggttggcgtggttttatcgatggtgctatcgaggagggcacccgcgcagcggttactgtaattgaggaactgcgtcctgcgcctgcggtgcgttcccacctg

SEQ ID NO: 210 - protein, 495 aa, synthetic construct
  REGION 1..495: note = Variant of monoamine oxidase
MTSRDGYQWTPETGLTQGVPSLGVISPPTNIEDTDKDGPWDVIVIGGGYCGLTATRDLTVAGFKTLLLEARDRIGGRSWSSNIDGYPYEMGGTWVHWHQSHVWREITRYKMHNALSPSFNFSRGVNHFQLRTNPTTSTYMTHEAEDELLRSALHKFTNVDGTNGRTVLPFPHDMFYVPEFRKYDEMSYSERIDQIRDELSLNERSSLEAFILLCSGGTLENSSFGEFLHWWAMSGYTYQGCMDCLISYKFKDGQSAFARRFWEEAAGTGRLGYVFGCPVRSVVNERDAVRVTARDGREFAAKRLVCTIPLNVLSSVHFSPPLSPQRMAAANIGHVNQCVKVHAEVSCPDMRSWSGISYPFNKLAYAIGDGTTPAGNTHIVCLGGAHQHIQPEEDVEATKMAVENMSPGNMDIKRLVFHNWCKDEFAKGAWFFAPPQLLSKSLDELRCRHGNVLFANSDWALGWRGFIDGAIEEGTRAAVTVIEELRPAPAVRSHL

SEQ ID NO: 211 - DNA, 1485 bp, synthetic construct
  misc_feature 1..1485: note = Variant of monoamine oxidase
  source 1..1485: mol_type = other DNA
atgaccagccgcgacggctatcagtggaccccggaaacgggtctgacccagggcgtaccgtccctgggtgtcatttcgccgccgactaacatcgaagataccgataaggacgggccttgggatgtcattgtcattgggggcgggtattgtgggctgaccgcaacccgtgatttaaccgtcgcagggttcaagacgctgctgctggaggcccgtgatcgtattggtggccgctcctggagcagtaatattgacggttacccgtatgagatgggtggcacttgggttcattggcatcaatctcacgtgtggcgtgaaatcacgcgttataaaatgcacaacgcgctgtctccatcatttaacttttcacgtggcgtgaatcacttccaactgcgtaccaatccgaccaccagtacgtacatgacgcacgaagcggaggatgaactgctgcgtagcgcattgcataaattcaccaatgtcgacggcactaatggccgtacagtgttgccgttcccacatgatatgttttatgtgccggaatttcgcaagtatgacgaaatgtcatattccgaacgcattgaccagatccgcgacgaactgtctttgaacgaacgctctagtttagaggctttcattttattatgtagcggtggcaccctggaaaactccagctttggtgaatttctgcattggtgggcaatgtcgggttacacgtatcagggctgtatggattgtttaatctcctataaatttaaggatggccagagtgcgttcgcgcgtcgcttctgggaagaagccgctggcactggccgtctgggctatgtctttggttgtccggtgcgttctgtggtgaacgaacgcgacgcagtacgtgttaccgcacgtgacggtcgcgaattcgcagcgaaacgtttggtttgcacgattccgctgaacgtattgagttctgttcattttagcccaccactgtccccgcaacgcatggccgctgcgaacattggccatgttaaccagtgcgtcaaagtgcatgcggaagtcagttgtccggatatgcgttcatggtcgggtatctcctatccgttcaacaaattagcctacgctatcggcgatggcacgaccccagcgggtaatacgcatattgtgtgccttgggggggcccataatcatatccagccggaagaggacgtggaagcaacgaagatggccgttgaaaacatgtcgcctgggaatatggatatcaaacgtctggtcttccacaactggtgcaaggatgaatttgccaaaggcgcgtggttcttcgcccctccacagctgctgtcaaagagcctggatgaactgcgctgccgtaggggtaatgtcctgtttgcaaactccgattgggccttaggttggcgtggttttatcgatggtgctatcgaggagggcacccgcgcagcggttactgtaattgaggaactgcgtcctgcgcctgcggtgcgttcccacctg

SEQ ID NO: 212 - protein, 495 aa, synthetic construct
  REGION 1..495: note = Variant of monoamine oxidase
MTSRDGYQWTPETGLTQGVPSLGVISPPTNIEDTDKDGPWDVIVIGGGYCGLTATRDLTVAGFKTLLLEARDRIGGRSWSSNIDGYPYEMGGTWVHWHQSHVWREITRYKMHNALSPSFNFSRGVNHFQLRTNPTTSTYMTHEAEDELLRSALHKFTNVDGTNGRTVLPFPHDMFYVPEFRKYDEMSYSERIDQIRDELSLNERSSLEAFILLCSGGTLENSSFGEFLHWWAMSGYTYQGCMDCLISYKFKDGQSAFARRFWEEAAGTGRLGYVFGCPVRSVVNERDAVRVTARDGREFAAKRLVCTIPLNVLSSVHFSPPLSPQRMAAANIGHVNQCVKVHAEVSCPDMRSWSGISYPFNKLAYAIGDGTTPAGNTHIVCLGGAHNHIQPEEDVEATKMAVENMSPGNMDIKRLVFHNWCKDEFAKGAWFFAPPQLLSKSLDELRCRRGNVLFANSDWALGWRGFIDGAIEEGTRAAVTVIEELRPAPAVRSHL

SEQ ID NO: 213 - DNA, 1485 bp, synthetic construct
  misc_feature 1..1485: note = Variant of monoamine oxidase
  source 1..1485: mol_type = other DNA
atgaccagccgcgacggctatcagtggaccccggaaacgggtctgacccagggcgtaccgtccctgggtgtcatttcgccgccgactaacatcgaagataccgataaggacgggccttgggatgtcattgtcattgggggcgggtattgtgggctgaccgcaacccgtgatttaaccgtcgcagggttcaagacgctgctgctggaggcccgtgatcgtattggtggccgctcctggagcagtaatattgacggttacccgtatgagatgggtggcacttgggttcattggcatcaatctcacgtgtggcgtgaaatctggcgttataaaatgcacaacgcgctgtctccatcatttaacttttcacgtggcgtgaatcacttccaactgcgtaccaatccgaccaccagtacgtacatgacgcacgaagcggaggatgaactgctgcgtagcgcattgcataaattcaccaatgtcgacggcactaatggccgtacagtgttgccgttcccacatgatatgttttatgtgccggaatttcgcaagtatgacgaaatgtcatattccgaacgcattgaccagatccgcgacgaactgtctttgaacgaacgctctagtttagaggctttcattttattatgtagcggtggcaccctggaaaactccagctttggtgaatttctgcattggtgggcaatgtcgggttacacgtatcagggctgtatggattgtttaatctcctataaatttaaggatggccagagtgcgttcgcgcgtcgcttctgggaagaagccgctggcactggccgtctgggctatgtctttggttgtccggtgcgttctgtggtgaacgaacgcgacgcagtacgtgttaccgcacgtgacggtcgcgaattcgcagcgaaacgtttggtttgcacgattccgctgaacgtattgagttctgttcattttagcccaccactgtccccgcaacgcatggccgctgcgaacattggccatgttaaccagtgcgtcaaagtgcatgcggaagtcagttgtccggatatgcgttcatggtcgggtatctcctatccgttcaacaaattagcctacgctatcggcgatggcacgaccccagcgggtaatacgcatattgtgtgccttgggggggcccataatcatatccagccggaagaggacgtggaagcaacgaagatggccgttgaaaacatgtcgcctgggaatatggatatcaaacgtctggtcttccacaactggtgcaaggatgaatttgccaaaggcgcgtggttcttcgcccctccacagctgctgtcaaagagcctggatgaactgcgctgccgtcacggtaatgtcctgtttgcaaactccgattgggccttaggttggcgtggttttatcgatggtgctatcgaggagggcacccgcgcagcggttactgtaattgaggaactgcgtcctgcgcctgcggtgcgttcccacctg

SEQ ID NO: 214 - protein, 495 aa, synthetic construct
  REGION 1..495: note = Variant of monoamine oxidase
MTSRDGYQWTPETGLTQGVPSLGVISPPTNIEDTDKDGPWDVIVIGGGYCGLTATRDLTVAGFKTLLLEARDRIGGRSWSSNIDGYPYEMGGTWVHWHQSHVWREIWRYKMHNALSPSFNFSRGVNHFQLRTNPTTSTYMTHEAEDELLRSALHKFTNVDGTNGRTVLPFPHDMFYVPEFRKYDEMSYSERIDQIRDELSLNERSSLEAFILLCSGGTLENSSFGEFLHWWAMSGYTYQGCMDCLISYKFKDGQSAFARRFWEEAAGTGRLGYVFGCPVRSVVNERDAVRVTARDGREFAAKRLVCTIPLNVLSSVHFSPPLSPQRMAAANIGHVNQCVKVHAEVSCPDMRSWSGISYPFNKLAYAIGDGTTPAGNTHIVCLGGAHNHIQPEEDVEATKMAVENMSPGNMDIKRLVFHNWCKDEFAKGAWFFAPPQLLSKSLDELRCRHGNVLFANSDWALGWRGFIDGAIEEGTRAAVTVIEELRPAPAVRSHL

SEQ ID NO: 215 - DNA, 1485 bp, synthetic construct
  misc_feature 1..1485: note = Variant of monoamine oxidase
  source 1..1485: mol_type = other DNA
atgaccagccgcgacggctatcagtggaccccggaaacgggtctgacccagggcgtaccgtccctgggtgtcatttcgccgccgactaacatcgaagataccgataaggacgggccttgggatgtcattgtcattgggggcgggtattgtgggctgaccgcaacccgtgatttaaccgtcgcagggttcaagacgctgctgctggaggcccgtgatcgtattggtggccgctcctggagcagtaatattgacggttacccgtatgagatgggtggcacttgggttcattggcatcaatctcacgtgtggcgtgaaatcacgcgttataaaatgcacaacgcgctgtctccatcatttaacttttcacgtggcgtgaatcacttccaactgcgtaccaatccgaccaccagtacgtacatgacgcacgaagcggaggatgaactgctgcgtagcgcattgcataaattcaccaatgtcgacggcactaatggccgtacagtgttgccgttcccacatgatatgttttatgtgccggaattttgtaagtatgacgaaatgtcatattccgaacgcattgaccagatccgcgacgaactgtctttgaacgaacgctctagtttagaggctttcattttattatgtagcggtggcaccctggaaaactccagctttggtgaatttctgcattggtgggcaatgtcgggttacacgtatcagggctgtatggattgtttaatctcctataaatttaaggatggccagagtgcgttcgcgcgtcgcttctgggaagaagccgctggcactggccgtctgggctatgtctttggttgtccggtgcgttctgtggtgaacgaacgcgacgcagtacgtgttaccgcacgtgacggtcgcgaattcgcagcgaaacgtttggtttgcacgattccgctgaacgtattgagttctgttcattttagcccaccactgtccccgcaacgcatggccgctgcgaacattggccatgttaaccagtgcgtcaaagtgcatgcggaagtcagttgtccggatatgcgttcatggtcgggtatctcctatccgttcaacaaattagcctacgctatcggcgatggcacgaccccagcgggtaatacgcatattgtgtgccttgggggggcccataatcatatccagccggaagaggacgtggaagcaacgaagatggccgttgaaaacatgtcgcctgggaatatggatatcaaacgtctggtcttccacaactggtgcaaggatgaatttgccaaaggcgcgtggttcttcgcccctccacagctgctgtcaaagagcctggatgaactgcgctgccgtcacggtaatgtcctgtttgcaaactccgattgggccttaggttggcgtggttttatcgatggtgctatcgaggagggcacccgcgcagcggttactgtaattgaggaactgcgtcctgcgcctgcggtgcgttcccacctg

SEQ ID NO: 216 - protein, 495 aa, synthetic construct
  REGION 1..495: note = Variant of monoamine oxidase
MTSRDGYQWTPETGLTQGVPSLGVISPPTNIEDTDKDGPWDVIVIGGGYCGLTATRDLTVAGFKTLLLEARDRIGGRSWSSNIDGYPYEMGGTWVHWHQSHVWREITRYKMHNALSPSFNFSRGVNHFQLRTNPTTSTYMTHEAEDELLRSALHKFTNVDGTNGRTVLPFPHDMFYVPEFCKYDEMSYSERIDQIRDELSLNERSSLEAFILLCSGGTLENSSFGEFLHWWAMSGYTYQGCMDCLISYKFKDGQSAFARRFWEEAAGTGRLGYVFGCPVRSVVNERDAVRVTARDGREFAAKRLVCTIPLNVLSSVHFSPPLSPQRMAAANIGHVNQCVKVHAEVSCPDMRSWSGISYPFNKLAYAIGDGTTPAGNTHIVCLGGAHNHIQPEEDVEATKMAVENMSPGNMDIKRLVFHNWCKDEFAKGAWFFAPPQLLSKSLDELRCRHGNVLFANSDWALGWRGFIDGAIEEGTRAAVTVIEELRPAPAVRSHL

SEQ ID NO: 217 - DNA, 1485 bp, synthetic construct
  misc_feature 1..1485: note = Variant of monoamine oxidase
  source 1..1485: mol_type = other DNA
atgaccagccgcgacggctatcagtggaccccggaaacgggtctgacccagggcgtaccgtccctgggtgtcatttcgccgccgactaacatcgaagataccgataaggacgggccttgggatgtcattgtcattgggggcgggtattgtgggctgaccgcaacccgtgatttaaccgtcgcagggttcaagacgctgctgctggaggcccgtgatcgtattggtggccgctccgttagcagtaatattgacggttacccgtatgagatgggtggcacttgggttcattggcatcaatctcacgtgtggcgtgaaatcacgcgttataaaatgcacaacgcgctgtctccatcatttaacttttcacgtggcgtgaatcacttccaactgcgtaccaatccgaccaccagtacgtacatgacgcacgaagcggaggatgaactgctgcgtagcgcattgcataaattcaccaatgtcgacggcactaatggccgtacagtgttgccgttcccacatgatatgttttatgtgccggaatttcgcaagtatgacgaaatgtcatattccgaacgcattgaccagatccgcgacgaactgtctttgaacgaacgctctagtttagaggctttcattttattatgtagcggtggcaccctggaaaactccagctttggtgaatttctgcattggtgggcaatgtcgggttacacgtatcagggctgtatggattgtttaatctcctataaatttaaggatggccagagtgcgttcgcgcgtcgcttctgggaagaagccgctggcactggccgtctgggctatgtctttggttgtccggtgcgttctgtggtgaacgaacgcgacgcagtacgtgttaccgcacgtgacggtcgcgaattcgcagcgaaacgtttggtttgcacgattccgctgaacgtattgagttctgttcattttagcccaccactgtccccgcaacgcatggccgctgcgaacattggccatgttaaccagtgcgtcaaagtgcatgcggaagtcagttgtccggatatgcgttcatggtcgggtatctcctatccgttcaacaaattagcctacgctatcggcgatggcacgaccccagcgggtaatacgcatattgtgtgccttgggggggcccataatcatatccagccggaagaggacgtggaagcaacgaagatggccgttgaaaacatgtcgcctgggaatatggatatcaaacgtctggtcttccacaactggtgcaaggatgaatttgccaaaggcgcgtggttcttcgcccctccacagctgctgtcaaagagcctggatgaactgcgctgccgtcacggtaatgtcctgtttgcaaactccgattgggccttaggttggcgtggttttatcgatggtgctatcgaggagggcacccgcgcagcggttactgtaattgaggaactgcgtcctgcgcctgcggtgcgttcccacctg

SEQ ID NO: 218 - protein, 495 aa, synthetic construct
  REGION 1..495: note = Variant of monoamine oxidase
MTSRDGYQWTPETGLTQGVPSLGVISPPTNIEDTDKDGPWDVIVIGGGYCGLTATRDLTVAGFKTLLLEARDRIGGRSVSSNIDGYPYEMGGTWVHWHQSHVWREITRYKMHNALSPSFNFSRGVNHFQLRTNPTTSTYMTHEAEDELLRSALHKFTNVDGTNGRTVLPFPHDMFYVPEFRKYDEMSYSERIDQIRDELSLNERSSLEAFILLCSGGTLENSSFGEFLHWWAMSGYTYQGCMDCLISYKFKDGQSAFARRFWEEAAGTGRLGYVFGCPVRSVVNERDAVRVTARDGREFAAKRLVCTIPLNVLSSVHFSPPLSPQRMAAANIGHVNQCVKVHAEVSCPDMRSWSGISYPFNKLAYAIGDGTTPAGNTHIVCLGGAHNHIQPEEDVEATKMAVENMSPGNMDIKRLVFHNWCKDEFAKGAWFFAPPQLLSKSLDELRCRHGNVLFANSDWALGWRGFIDGAIEEGTRAAVTVIEELRPAPAVRSHL

SEQ ID NO: 219 - DNA, 1485 bp, synthetic construct
  misc_feature 1..1485: note = Variant of monoamine oxidase
  source 1..1485: mol_type = other DNA
atgaccagccgcgacggctatcagtggaccccggaaacgggtctgacccagggcgtaccgtccctgggtgtcatttcgccgccgactaacatcgaagataccgataaggacgggccttgggatgtcattgtcattgggggcgggtattgtgggctgaccgcaacccgtgatttaaccgtcgcagggttcaagacgctgctgctggaggcccgtgatcgtattggtggccgctcctggagcagtaatattgacggttacccgtatgagatgggtggcacttgggttcattggcatcaatctcacgtgtggcgtgaaatcacgcgttataaaatgcacaacgcgctgtctccatcatttaacttttcacgtggcgtgaatcacttccaactgcgtaccaatccgaccaccagtacgtacatgacgcacgaagcggaggatgaactgctgcgtagcgcattgcataaattcaccaatgtcgacggcactaatggccgtacagtgttgccgttcccacatgatatgttttatgtgccggaatttcgcaagtatgacgaaatgtcatattccgaacgcattgaccagatccgcgacgaactgtctttgaacgaacgctctagtttagaggctttcattttattatgtagcggtggcaccctggaaaactccagctttggtgaatttctgcattggtgggcaatgtcgggttacacgtatcagggctgtatggattgtttaatctcctataaatttaaggatggccagagtgcgttcgcgcgtcgcttctgggaagaagccgctggcactggccgtctgggctatgtctttggttgtccggtgcgttctgtggtgaacgaacgcgacgcagtacgtgttaccgcacgtgacggtcgcgaattcgcagcgaaacgtttggtttgcacgattccgctgaacgtattgagttctgttcattttagcccaccactgtccccgcaacgcatggccgctgcgaacattggccatgttaaccagtgcgtcaaagtgcatgcggaagtcagttgtccggatatgcgttcatggtcgggtatctcctatccgttcaacaaattagcctacgctatcggcgatggcacgaccccagcgggtaatacgcatattgtgtgccttgggggggcccataatcatatccagccggaagaggacgtggaagcaacgaagatggccgttgaaaacatgtcgcctgggaatatggatatcaaacgtctggtcttccacaactggtgcaaggatgaatttgccaaaggcgcgtggttcttcgcccctccacagctgctgtcaaagagcctggatgaactgcgctgccgtcacggtaatgtcctgtttgcaaactccgattgggccttaggttggcgtggttttatcgatggtgctatcgaggagggcacccgcgcagcggttactgtaattcgtgaactgcgtcctgcgcctgcggtgcgttcccacctg

SEQ ID NO: 220 - protein, 495 aa, synthetic construct
  REGION 1..495: note = Variant of monoamine oxidase
MTSRDGYQWTPETGLTQGVPSLGVISPPTNIEDTDKDGPWDVIVIGGGYCGLTATRDLTVAGFKTLLLEARDRIGGRSWSSNIDGYPYEMGGTWVHWHQSHVWREITRYKMHNALSPSFNFSRGVNHFQLRTNPTTSTYMTHEAEDELLRSALHKFTNVDGTNGRTVLPFPHDMFYVPEFRKYDEMSYSERIDQIRDELSLNERSSLEAFILLCSGGTLENSSFGEFLHWWAMSGYTYQGCMDCLISYKFKDGQSAFARRFWEEAAGTGRLGYVFGCPVRSVVNERDAVRVTARDGREFAAKRLVCTIPLNVLSSVHFSPPLSPQRMAAANIGHVNQCVKVHAEVSCPDMRSWSGISYPFNKLAYAIGDGTTPAGNTHIVCLGGAHNHIQPEEDVEATKMAVENMSPGNMDIKRLVFHNWCKDEFAKGAWFFAPPQLLSKSLDELRCRHGNVLFANSDWALGWRGFIDGAIEEGTRAAVTVIRELRPAPAVRSHL

SEQ ID NO: 221 - DNA, 1485 bp, synthetic construct
  misc_feature 1..1485: note = Variant of monoamine oxidase
  source 1..1485: mol_type = other DNA
atgaccagccgcgacggctatcagtggaccccggaaacgggtctgacccagggcgtaccgtccctgggtgtcatttcgccgccgactaacatcgaagataccgataaggacgggccttgggatgtcattgtcattgggggcgggtattgtgggctgaccgcaacccgtgatttaaccgtcgcagggttcaagacgctgctgctggaggcccgtgatcgtattggtggccgctcctggagcagtaatattgacggttacccgtatgagatgggtggcacttgggttcattggcatcaatctcacgtgtggcgtgaaatcacgcgttataaaatgcacaacgcgctgtctccatcatttaacttttcacgtggcgtgaatcacttccaactgcgtaccaatccgaccaccagtacgtacatgacgcacgaagcggaggatgaactgctgcgtagcgcattgcataaattcaccaatgtcgacggcactaatggccgtacagtgttgccgttcccacatgatatgttttatgtgccggaatttcgcaagtatgacgaaatgtcatattccgaacgcattgcgcagatccgcgacgaactgtctttgaacgaacgctctagtttagaggctttcattttattatgtagcggtggcaccctggaaaactccagctttggtgaatttctgcattggtgggcaatgtcgggttacacgtatcagggctgtatggattgtttaatctcctataaatttaaggatggccagagtgcgttcgcgcgtcgcttctgggaagaagccgctggcactggccgtctgggctatgtctttggttgtccggtgcgttctgtggtgaacgaacgcgacgcagtacgtgttaccgcacgtgacggtcgcgaattcgcagcgaaacgtttggtttgcacgattccgctgaacgtattgagttctgttcattttagcccaccactgtccccgcaacgcatggccgctgcgaacattggccatgttaaccagtgcgtcaaagtgcatgcggaagtcagttgtccggatatgcgttcatggtcgggtatctcctatccgttcaacaaattagcctacgctatcggcgatggcacgaccccagcgggtaatacgcatattgtgtgccttgggggggcccataatcatatccagccggaagaggacgtggaagcaacgaagatggccgttgaaaacatgtcgcctgggaatatggatatcaaacgtctggtcttccacaactggtgcaaggatgaatttgccaaaggcgcgtggttcttcgcccctccacagctgctgtcaaagagcctggatgaactgcgctgccgtcacggtaatgtcctgtttgcaaactccgattgggccttaggttggcgtggttttatcgatggtgctatcgaggagggcacccgcgcagcggttactgtaattgaggaactgcgtcctgcgcctgcggtgcgttcccacctg

SEQ ID NO: 222 - protein, 495 aa, synthetic construct
  REGION 1..495: note = Variant of monoamine oxidase
MTSRDGYQWTPETGLTQGVPSLGVISPPTNIEDTDKDGPWDVIVIGGGYCGLTATRDLTVAGFKTLLLEARDRIGGRSWSSNIDGYPYEMGGTWVHWHQSHVWREITRYKMHNALSPSFNFSRGVNHFQLRTNPTTSTYMTHEAEDELLRSALHKFTNVDGTNGRTVLPFPHDMFYVPEFRKYDEMSYSERIAQIRDELSLNERSSLEAFILLCSGGTLENSSFGEFLHWWAMSGYTYQGCMDCLISYKFKDGQSAFARRFWEEAAGTGRLGYVFGCPVRSVVNERDAVRVTARDGREFAAKRLVCTIPLNVLSSVHFSPPLSPQRMAAANIGHVNQCVKVHAEVSCPDMRSWSGISYPFNKLAYAIGDGTTPAGNTHIVCLGGAHNHIQPEEDVEATKMAVENMSPGNMDIKRLVFHNWCKDEFAKGAWFFAPPQLLSKSLDELRCRHGNVLFANSDWALGWRGFIDGAIEEGTRAAVTVIEELRPAPAVRSHL

SEQ ID NO: 223 - DNA, 1485 bp, synthetic construct
  misc_feature 1..1485: note = Variant of monoamine oxidase
  source 1..1485: mol_type = other DNA
atgaccagccgcgacggctatcagtggaccccggaaacgggtctgacccagggcgtaccgtccctgggtgtcatttcgccgccgactaacatcgaagataccgataaggacgggccttgggatgtcattgtcattgggggcgggtattgtgggctgaccgcaacccgtgatttaaccgtcgcagggttcaagacgctgctgctggaggcccgtgatcgtattggtggccgctcctggagcagtaatattgacggttacccgtatgagatgggtggcacttgggttcattggcatcaatctcacgtgtggcgtgaaatcacgcgttataaaatgcacaacgcgctgtcttgttcatttaacttttcacgtggcgtgaatcacttccaactgcgtaccaatccgaccaccagtacgtacatgacgcacgaagcggaggatgaactgctgcgtagcgcattgcataaattcaccaatgtcgacggcactaatggccgtacagtgttgccgttcccacatgatatgttttatgtgccggaatttcgcaagtatgacgaaatgtcatattccgaacgcattgaccagatccgcgacgaactgtctttgaacgaacgctctagtttagaggctttcattttattatgtagcggtggcaccctggaaaactccagctttggtgaatttctgcattggtgggcaatgtcgggttacacgtatcagggctgtatggattgtttaatctcctataaatttaaggatggccagagtgcgttcgcgcgtcgcttctgggaagaagccgctggcactggccgtctgggctatgtctttggttgtccggtgcgttctgtggtgaacgaacgcgacgcagtacgtgttaccgcacgtgacggtcgcgaattcgcagcgaaacgtttggtttgcacgattccgctgaacgtattgagttctgttcattttagcccaccactgtccccgcaacgcatggccgctgcgaacattggccatgttaaccagtgcgtcaaagtgcatgcggaagtcagttgtccggatatgcgttcatggtcgggtatctcctatccgttcaacaaattagcctacgctatcggcgatggcacgaccccagcgggtaatacgcatattgtgtgccttgggggggcccataatcatatccagccggaagaggacgtggaagcaacgaagatggccgttgaaaacatgtcgcctgggaatatggatatcaaacgtctggtcttccacaactggtgcaaggatgaatttgccaaaggcgcgtggttcttcgcccctccacagctgctgtcaaagagcctggatgaactgcgctgccgtcacggtaatgtcctgtttgcaaactccgattgggccttaggttggcgtggttttatcgatggtgctatcgaggagggcacccgcgcagcggttactgtaattgaggaactgcgtcctgcgcctgcggtgcgttcccacctg

SEQ ID NO: 224 - protein, 495 aa, synthetic construct
  REGION 1..495: note = Variant of monoamine oxidase
MTSRDGYQWTPETGLTQGVPSLGVISPPTNIEDTDKDGPWDVIVIGGGYCGLTATRDLTVAGFKTLLLEARDRIGGRSWSSNIDGYPYEMGGTWVHWHQSHVWREITRYKMHNALSCSFNFSRGVNHFQLRTNPTTSTYMTHEAEDELLRSALHKFTNVDGTNGRTVLPFPHDMFYVPEFRKYDEMSYSERIDQIRDELSLNERSSLEAFILLCSGGTLENSSFGEFLHWWAMSGYTYQGCMDCLISYKFKDGQSAFARRFWEEAAGTGRLGYVFGCPVRSVVNERDAVRVTARDGREFAAKRLVCTIPLNVLSSVHFSPPLSPQRMAAANIGHVNQCVKVHAEVSCPDMRSWSGISYPFNKLAYAIGDGTTPAGNTHIVCLGGAHNHIQPEEDVEATKMAVENMSPGNMDIKRLVFHNWCKDEFAKGAWFFAPPQLLSKSLDELRCRHGNVLFANSDWALGWRGFIDGAIEEGTRAAVTVIEELRPAPAVRSHL

SEQ ID NO: 225 - DNA, 1485 bp, synthetic construct
  misc_feature 1..1485: note = Variant of monoamine oxidase
  source 1..1485: mol_type = other DNA
atgaccagccgcgacggctatcagtggaccccggaaacgggtctgacccagggcgtaccgtccctgggtgtcatttcgccgccgactaacatcgaagataccgataaggacgggccttgggatgtcattgtcattgggggcgggtattgtgggctgaccgcaacccgtgatttaaccgtcgcagggttcaagacgctgctgctggaggcccgtgatcgtattggtggccgctcctggagcagtaatattgacggttacccgtatgagatgggtggcacttgggttcattggcatcaatctcacgtgtggcgtgaaatcacgcgttataaaatgcacaacgcgctgtctccatcatttaacttttcacgtggcgtgaatcacttccaactgcgtaccaatccgaccaccagtacgtacatgacgcacgaagcggaggatgaactgctgcgtagcgcattgcataaattcaccaatgtcgacggcactaatggccgtacagtgttgccgttcccacatgatatgttttatgtgccggaatttcgcaagtatgacgaaatgtcatattccgaacgcattgaccagatccgcgacgaactgtctttgaacgaacgctctagtttagaggctttcattttattatgtagcggtggcaccctggaaaactccagctttggtgaatttctgcattggtgggcaatgtcgggttacacgtatcagggctgtatggattgtttaatctcctataaatttaaggatggccagagtgcgttcgcgcgtcgcttctgggaagaagccgctggcactggccgtctgggctatgtctttggttgtccggtgcgttctgtggtgaacgaacgcgacgcagtacgtgttaccgcacgtgacggtcgcgaattcgcagcgaaacgtttggtttgcacgattccgctgaacgtattgagttctgttcattttagcccaccactgtccccgcaacgcatggccgctgcgaacattggccatgttaaccagtgcgtcaaagtgcatgcggaagtcagttgtccggatatgcgttcatggtcgggtatctcctatccgttcaacaaattagcctacgctatcggcgatggcacgaccccagcgggtaatacgcatattgtgtgccttgggggggcccataatcatatccagccggaagaggacgtggaagcaacgaagatggccgttgaaaacatgtcgcctgggaatatggatatcaaacgtctggtcttccacaactggtgcaaggatgaatttgccaaaggcgcgtggttcttctcgcctccacagctgctgtcaaagagcctggatgaactgcgctgccgtcacggtaatgtcctgtttgcaaactccgattgggccttaggttggcgtggttttatcgatggtgctatcgaggagggcacccgcgcagcggttactgtaattgaggaactgcgtcctgcgcctgcggtgcgttcccacctg

SEQ ID NO: 226 - protein, 495 aa, synthetic construct
  REGION 1..495: note = Variant of monoamine oxidase
MTSRDGYQWTPETGLTQGVPSLGVISPPTNIEDTDKDGPWDVIVIGGGYCGLTATRDLTVAGFKTLLLEARDRIGGRSWSSNIDGYPYEMGGTWVHWHQSHVWREITRYKMHNALSPSFNFSRGVNHFQLRTNPTTSTYMTHEAEDELLRSALHKFTNVDGTNGRTVLPFPHDMFYVPEFRKYDEMSYSERIDQIRDELSLNERSSLEAFILLCSGGTLENSSFGEFLHWWAMSGYTYQGCMDCLISYKFKDGQSAFARRFWEEAAGTGRLGYVFGCPVRSVVNERDAVRVTARDGREFAAKRLVCTIPLNVLSSVHFSPPLSPQRMAAANIGHVNQCVKVHAEVSCPDMRSWSGISYPFNKLAYAIGDGTTPAGNTHIVCLGGAHNHIQPEEDVEATKMAVENMSPGNMDIKRLVFHNWCKDEFAKGAWFFSPPQLLSKSLDELRCRHGNVLFANSDWALGWRGFIDGAIEEGTRAAVTVIEELRPAPAVRSHL

SEQ ID NO: 227 - DNA, 1485 bp, synthetic construct
  misc_feature 1..1485: note = Variant of monoamine oxidase
  source 1..1485: mol_type = other DNA
atgaccagccgcgacggctatcagtggaccccggaaacgggtctgacccagggcgtaccgtccctgggtgtcatttcgccgccgactaacatcgaagataccgataaggacgggccttgggatgtcattgtcattgggggggggtattgtgggctgaccgcaacccgtgatttaaccgtcgcagggttcaagacgctgctgctggaggcccgtgatcgtattggtggccgctcctggagcagtaatattgacggttacccgtatgagatgggtggcacttgggttcattggcatcaatctcacgtgtggcgtgaaatcacgcgttataaaatgcacaacgcgctgtctccatcatttaacttttcacgtggcgtgaatcacttccaactgcgtaccaatccgaccaccagtacgtacatgacgcacgaagaggaggatgaactgctgcgtagcgcattgcataaattcaccaatgtcgacggcactaatggccgtacagtgttgccgttcccacatgatatgttttatgtgccggaatttcgcaagtatgacgaaatgtcatattccgaacgcattgaccagatccgcgacgaactgtctttgaacgaacgctctagtttagaggctttcattttattatgtagcggtggcaccctggaaaactccagctttggtgaatttctgcattggtgggcaatgtcgggttacacgtatcagggctgtatggattgtttaatctcctataaatttaaggatggccagagtgcgttcgcgcgtcgcttctgggaagaagccgcaggcactggccgtctgggctatgtctttggttgtccggtgcgttctgtggtgaacgaacgcgacgcagtacgtgttaccgcacgtgacggtcgcgaattcgcagcgaaacgtttggtttgcacgattccgctgaacgtattgagttctgttcattttagcccaccactgtccccgcaacgcatggccgctgcgaacattggccatgttaaccagtgcgtcaaagtgcatgcggaagtcagttgtccggatatgcgttcatggtcgggtatctcctatccgttcaacaaattagcctacgctatcggcgatggcacgaccccagcgggtaatacgcatattgtgtgccttgggggggcccataatcatatccagccggaagaggacgtggaagcaacgaagatggccgttgaaaacatgtcgcctgggaatatggatatcaaacgtctggtcttccacaactggtgcaaggatgaatttgccaaaggcgcgtggttcttcgcccctccacagctgctgtcaaagagcctggatgaactgcgcgcacgtcacggtaatgtcctgtttgcaaactccgattgggccttaggttggcgtggttttatcgatggtgctatcgaggagggcacccgcgcagcggttactgtaattgaggaactgcgtcctgcgcctgcggtgcgttcccacctg

SEQ ID NO: 228 - protein, 495 aa, synthetic construct
  REGION 1..495: note = Variant of monoamine oxidase
MTSRDGYQWTPETGLTQGVPSLGVISPPTNIEDTDKDGPWDVIVIGGGYCGLTATRDLTVAGFKTLLLEARDRIGGRSWSSNIDGYPYEMGGTWVHWHQSHVWREITRYKMHNALSPSFNFSRGVNHFQLRTNPTTSTYMTHEEEDELLRSALHKFTNVDGTNGRTVLPFPHDMFYVPEFRKYDEMSYSERIDQIRDELSLNERSSLEAFILLCSGGTLENSSFGEFLHWWAMSGYTYQGCMDCLISYKFKDGQSAFARRFWEEAAGTGRLGYVFGCPVRSVVNERDAVRVTARDGREFAAKRLVCTIPLNVLSSVHFSPPLSPQRMAAANIGHVNQCVKVHAEVSCPDMRSWSGISYPFNKLAYAIGDGTTPAGNTHIVCLGGAHNHIQPEEDVEATKMAVENMSPGNMDIKRLVFHNWCKDEFAKGAWFFAPPQLLSKSLDELRARHGNVLFANSDWALGWRGFIDGAIEEGTRAAVTVIEELRPAPAVRSHL

SEQ ID NO: 229 - DNA, 1485 bp, synthetic construct
  misc_feature 1..1485: note = Variant of monoamine oxidase
  source 1..1485: mol_type = other DNA
atgaccagccgcgacggctatcagtggaccccggaaacgggtctgacccagggcgtaccgtccctgggtgtcatttcgccgccgactaacatcgaagataccgataaggacgggccttgggatgtcattgtcattgggggcgggtattgtgggctgaccgcaacccgtgatttaaccgtcgcagggttcaagacgctgctgctggaggcccgtgatcgtattggtggccgctcctggagcagtaatattgacggttacccgtatgagatgggtggcacttgggttcattggcatcaatctcacgtgtggcgtgaaatcacgcgttataaaatgcacaacgcgctgtctccatcatttaacttttcacgtggcgtgaatcacttccaactgcgtaccaatccgaccaccagtacgtacatgacgcacgaagcggaggatgaactgctgcgtagcgcattgcataaattcaccaatgtcgacggcactaatggccgtacagtgttgccgttcccacatgatatgttttatgtgccggaatttcgcaagtatgacgaaatgtcatattccgaacgcattgaccagatccgcgacgaactgtctttgaacgaacgctctagtttagaggctttcattttattatgtagcggtggcaccctggaaaactccagctttggtgaatttctgcattggtgggcaatgtcgggttacacgtatcagggctgtatggattgtttaatctcctataaatttaaggatggccagagtgcgttcgcgcgtcgcttctgggaagaagccgctggcactggccgtctgggctatgtctttggttgtccggtgcgttctgtggtgaacgaacgcgacgcagtacgtgttaccgcacgtgacggtcgcgaattcgcagcgaaacgtttggtttgcacgattccgctgaacgtattgagttctgttcattttagcccaccactgtccccgcaacgcatggccgctgcgaacattggccatgttaaccagtgcgtcaaagtgcatgcggaagtcagttgtccggatatgcgttcatggtcgggtatctcctatccgttcaacaaattagcctacgctatcggcgatggcacgaccccagcgggtaatacgcatattgtgtgccttgggggggcccattggcatatccagccggaagaggacgtggaagcaacgaagatggccgttgaaaacatgtcgcctgggaatatggatatcaaacgtctggtcttccacaactggtgcaaggatgaatttgccaaaggcgcgtggttcttcgcccctccacagctgctgtcaaagagcctggatgaactgcgctgccgtcacggtaatgtcctgtttgcaaactccgattgggccttaggttggcgtggttttatcgatggtgctatcgaggagggcacccgcgcagcggttactgtaattgaggaactgcgtcctgcgcctgcggtgcgttcccacctg

SEQ ID NO: 230 - protein, 495 aa, synthetic construct
  REGION 1..495: note = Variant of monoamine oxidase
MTSRDGYQWTPETGLTQGVPSLGVISPPTNIEDTDKDGPWDVIVIGGGYCGLTATRDLTVAGFKTLLLEARDRIGGRSWSSNIDGYPYEMGGTWVHWHQSHVWREITRYKMHNALSPSFNFSRGVNHFQLRTNPTTSTYMTHEAEDELLRSALHKFTNVDGTNGRTVLPFPHDMFYVPEFRKYDEMSYSERIDQIRDELSLNERSSLEAFILLCSGGTLENSSFGEFLHWWAMSGYTYQGCMDCLISYKFKDGQSAFARRFWEEAAGTGRLGYVFGCPVRSVVNERDAVRVTARDGREFAAKRLVCTIPLNVLSSVHFSPPLSPQRMAAANIGHVNQCVKVHAEVSCPDMRSWSGISYPFNKLAYAIGDGTTPAGNTHIVCLGGAHWHIQPEEDVEATKMAVENMSPGNMDIKRLVFHNWCKDEFAKGAWFFAPPQLLSKSLDELRCRHGNVLFANSDWALGWRGFIDGAIEEGTRAAVTVIEELRPAPAVRSHL

SEQ ID NO: 231 - DNA, 1485 bp, synthetic construct
  misc_feature 1..1485: note = Variant of monoamine oxidase
  source 1..1485: mol_type = other DNA
atgaccagccgcgacggctatcagtggaccccggaaacgggtctgacccagggcgtaccgtccctgggtgtcatttcgccgccgactaacatcgaagataccgataaggacgggccttgggatgtcattgtcattgggggcgggtattgtgggctgaccgcaacccgtgatttaaccgtcgcagggttcaagacgctgctgctggaggcccgtgatcgtattggtggccgctcctggagcagtaatattgacggttacccgtatgagatgggtggcacttgggttcattggcatcaatctcacgtgtggcgtgaaatcacgcgttataaaatgcacaacgcgctgtctccatcatttaacttttcacgtggcgtgaatcacttccaactgcgtaccaatccgaccaccagtacgtacatgacgcacgaagcggaggatgaactgctgcgtagcgcattgcataaattcaccaatgtcgacggcactaatggccgtacagtgttgccgttcccacatgatatgttttatgtgccggaatttcgcaagtatgacgaaatgtcatattccgaacgcattgaccagatcggggacgaactgtctttgaacgaacgctctagtttagaggctttcattttattatgtagcggtggcaccctggaaaactccagctttggtgaatttctgcattggtgggcaatgtcgggttacacgtatcagggctgtatggattgtttaatctcctataaatttaaggatggccagagtgcgttcgcgcgtcgcttctgggaagaagccgctggcactggccgtctgggctatgtctttggttgtccggtgcgttctgtggtgaacgaacgcgacgcagtacgtgttaccgcacgtgacggtcgcgaattcgcagcgaaacgtttggtttgcacgattccgctgaacgtattgagttctgttcattttagcccaccactgtccccgcaacgcatggccgctgcgaacattggccatgttaaccagtgcgtcaaagtgcatgcggaagtcagttgtccggatatgcgttcatggtcgggtatctcctatccgttcaacaaattagcctacgctatcggcgatggcacgaccccagcgggtaatacgcatattgtgtgccttgggggggcccataatcatatccagccggaagaggacgtggaagcaacgaagatggccgttgaaaacatgtcgcctgggaatatggatatcaaacgtctggtcttccacaactggtgcaaggatgaatttgccaaaggcgcgtggttcttcgcccctccacagctgctgtcaaagagcctggatgaactgcgctgccgtcacggtaatgtcctgtttgcaaactccgattgggccttaggttggcgtggttttatcgatggtgctatcgaggagggcacccgcgcagcggttactgtaattgaggaactgcgtcctgcgcctgcggtgcgttcccacctg

SEQ ID NO: 232 - protein, 495 aa, synthetic construct
  REGION 1..495: note = Variant of monoamine oxidase
MTSRDGYQWTPETGLTQGVPSLGVISPPTNIEDTDKDGPWDVIVIGGGYCGLTATRDLTVAGFKTLLLEARDRIGGRSWSSNIDGYPYEMGGTWVHWHQSHVWREITRYKMHNALSPSFNFSRGVNHFQLRTNPTTSTYMTHEAEDELLRSALHKFTNVDGTNGRTVLPFPHDMFYVPEFRKYDEMSYSERIDQIGDELSLNERSSLEAFILLCSGGTLENSSFGEFLHWWAMSGYTYQGCMDCLISYKFKDGQSAFARRFWEEAAGTGRLGYVFGCPVRSVVNERDAVRVTARDGREFAAKRLVCTIPLNVLSSVHFSPPLSPQRMAAANIGHVNQCVKVHAEVSCPDMRSWSGISYPFNKLAYAIGDGTTPAGNTHIVCLGGAHNHIQPEEDVEATKMAVENMSPGNMDIKRLVFHNWCKDEFAKGAWFFAPPQLLSKSLDELRCRHGNVLFANSDWALGWRGFIDGAIEEGTRAAVTVIEELRPAPAVRSHL

SEQ ID NO: 233 - DNA, 1485 bp, synthetic construct
  misc_feature 1..1485: note = Variant of monoamine oxidase
  source 1..1485: mol_type = other DNA
atgaccagccgcgacggctatcagtggaccccggaaacgggtctgacccagggcgtaccgtccctgggtgtcatttcgccgccgactaacatcgaagataccgataaggacgggccttgggatgtcattgtcattgggggcgggtattgtgggctgaccgcaacccgtgatttaaccgtcgcagggttcaagacgctgctgctggaggcccgtgatcgtattggtggccgctcctggagcagtaatattgacggttacccgtatgagatgggtggcacttgggttcattggcatcaatctcacgtgtggcgtgaaatcacgcgttataaaatgcacaacgcgctgtctccatcatttaacttttcacgtggcgtgaatcacttccaactgcgtaccaatccgaccaccagtacgtacatgacgcacgaagcggaggatgaactgctgcgtagcgcattgcataaattcaccaatgtcgacggcactaatggccgtacagtgttgccgttcccacatgatatgttttatgtgccggaatttcgcaagtatgacgaaatgtcatattccgaacgcattgaccagatcatggacgaactgtctttgaacgaacgctctagtttagaggctttcattttattatgtagcggtggcaccctggaaaactccagctttggtgaatttctgcattggtgggcaatgtcgggttacacgtatcagggctgtatggattgtttaatctcctataaatttaaggatggccagagtgcgttcgcgcgtcgcttctgggaagaagccgctggcactggccgtctgggctatgtctttggttgtccggtgcgttctgtggtgaacgaacgcgacgcagtacgtgttaccgcacgtgacggtcgcgaattcgcagcgaaacgtttggtttgcacgattccgctgaacgtattgagttctgttcattttagcccaccactgtccccgcaacgcatggccgctgcgaacattggccatgttaaccagtgcgtcaaagtgcatgcggaagtcagttgtccggatatgcgttcatggtcgggtatctcctatccgttcaacaaattagcctacgctatcggcgatggcacgaccccagcgggtaatacgcatattgtgtgccttgggggggcccataatcatatccagccggaagaggacgtggaagcaacgaagatggccgttgaaaacatgtcgcctgggaatatggatatcaaacgtctggtcttccacaactggtgcaaggatgaatttgccaaaggcgcgtggttcttcgcccctccacagctgctgtcaaagagcctggatgaactgcgctgccgtcacggtaatgtcctgtttgcaaactccgattgggccttaggttggcgtggttttatcgatggtgctatcgaggagggcacccgcgcagcggttactgtaattgaggaactgcgtcctgcgcctgcggtgcgttcccacctg

SEQ ID NO: 234 - protein, 495 aa, synthetic construct
  REGION 1..495: note = Variant of monoamine oxidase
MTSRDGYQWTPETGLTQGVPSLGVISPPTNIEDTDKDGPWDVIVIGGGYCGLTATRDLTVAGFKTLLLEARDRIGGRSWSSNIDGYPYEMGGTWVHWHQSHVWREITRYKMHNALSPSFNFSRGVNHFQLRTNPTTSTYMTHEAEDELLRSALHKFTNVDGTNGRTVLPFPHDMFYVPEFRKYDEMSYSERIDQIMDELSLNERSSLEAFILLCSGGTLENSSFGEFLHWWAMSGYTYQGCMDCLISYKFKDGQSAFARRFWEEAAGTGRLGYVFGCPVRSVVNERDAVRVTARDGREFAAKRLVCTIPLNVLSSVHFSPPLSPQRMAAANIGHVNQCVKVHAEVSCPDMRSWSGISYPFNKLAYAIGDGTTPAGNTHIVCLGGAHNHIQPEEDVEATKMAVENMSPGNMDIKRLVFHNWCKDEFAKGAWFFAPPQLLSKSLDELRCRHGNVLFANSDWALGWRGFIDGAIEEGTRAAVTVIEELRPAPAVRSHL

SEQ ID NO: 235 - DNA, 1485 bp, synthetic construct
  misc_feature 1..1485: note = Variant of monoamine oxidase
  source 1..1485: mol_type = other DNA
atgaccagccgcgacggctatcagtggaccccggaaacgggtctgacccagggcgtaccgtccctgggtgtcatttcgccgccgactaacatcgaagataccgataaggacgggccttgggatgtcattgtcattgggggcgggtattgtgggctgaccgcaacccgtgatttaaccgtcgcagggttcaagacgctgctgctggaggcccgtgatcgtattggtggccgctcctggagcagtaatattgacggttacccgtatgagatgggtggcacttgggttcattggcatcaatctcacgtgtggcgtgaaatcacgcgttataaaatgcacaacgcgctgtctccatcatttaacttttcacgtggcgtgaatcacttccaactgcgtaccaatccgaccaccagtacgtacatgacgcacgaagcggaggatgaactgctgcgtagcgcattgcataaattcaccaatgtcgacggcactaatggccgtacagtgttgccgttcccacatgatatgttttatgtgccggaatttcgcaagtatgacgaaatgtcatattccgaacgcattgaccagatccgcgacgaactgtctttgaacgaacgctctagtttagaggctttcattttattatgtagcggtggcaccctggaaaactccagctttggtgaatttctgcattggtgggcaatgtcgggttacacgtatcagggctgtatggattgtttaatctcctataaatttaaggatggccagagtgcgttcgcgcgtcgcttctgggaagaagccgctggcactggccgtctgggctatgtctttggttgtccggtgcgttctgtggtgaacgaacgcgacgcagtacgtgttaccgcacgtgacggtcgcgaattcgcagcgaaacgtttggtttgcacgattccgctgaacgtattgagttctgttcattttagcccaccactgtccccgcaacgcatggccgctgcgaacattggccatgttaaccagtgcgtcaaagtgcatgcggaagtcagttgtccggatatgcgttcatggtcgggtatctcctattctttcaacaaattagcctacgctatcggcgatggcacgaccccagcgggtaatacgcatattgtgtgccttgggggggcccataatcatatccagccggaagaggacgtggaagcaacgaagatggccgttgaaaacatgtcgcctgggaatatggatatcaaacgtctggtcttccacaactggtgcaaggatgaatttgccaaaggcgcgtggttcttcgcccctccacagctgctgtcaaagagcctggatgaactgcgctgccgtcacggtaatgtcctgtttgcaaactccgattgggccttaggttggcgtggttttatcgatggtgctatcgaggagggcacccgcgcagcggttactgtaattgaggaactgcgtcctgcgcctgcggtgcgttcccacctg

SEQ ID NO: 236 - protein, 495 aa, synthetic construct
  REGION 1..495: note = Variant of monoamine oxidase
MTSRDGYQWTPETGLTQGVPSLGVISPPTNIEDTDKDGPWDVIVIGGGYCGLTATRDLTVAGFKTLLLEARDRIGGRSWSSNIDGYPYEMGGTWVHWHQSHVWREITRYKMHNALSPSFNFSRGVNHFQLRTNPTTSTYMTHEAEDELLRSALHKFTNVDGTNGRTVLPFPHDMFYVPEFRKYDEMSYSERIDQIRDELSLNERSSLEAFILLCSGGTLENSSFGEFLHWWAMSGYTYQGCMDCLISYKFKDGQSAFARRFWEEAAGTGRLGYVFGCPVRSVVNERDAVRVTARDGREFAAKRLVCTIPLNVLSSVHFSPPLSPQRMAAANIGHVNQCVKVHAEVSCPDMRSWSGISYSFNKLAYAIGDGTTPAGNTHIVCLGGAHNHIQPEEDVEATKMAVENMSPGNMDIKRLVFHNWCKDEFAKGAWFFAPPQLLSKSLDELRCRHGNVLFANSDWALGWRGFIDGAIEEGTRAAVTVIEELRPAPAVRSHL

SEQ ID NO: 237 - DNA, 1485 bp, synthetic construct
  misc_feature 1..1485: note = Variant of monoamine oxidase
  source 1..1485: mol_type = other DNA
atgaccagccgcgacggctatcagtggaccccggaaacgggtctgacccagggcgtaccgtccctgggtgtcatttcgccgccgactaacatcgaagataccgataaggacgggccttgggatgtcattgtcattgggggcgggtattgtgggctgaccgcaacccgtgatttaaccgtcgcagggttcaagacgctgctgctggaggcccgtgatcgtattggtggccgctcctggagcagtaatattgacggttacccgtatgagatgggtggcacttgggttcattggcatcaatctcacgtgtggcgtgaaatcacgcgttataaaatgcacaacgcgctgtctccatcatttaacttttcacgtggcgtgaatcacttccaactgcgtaccaatccgaccaccagtacgtacatgacgcacgaagcggaggatgaactgctgcgtagcgcattgcataaattcaccaatgtcgacggcactaatggccgtacagtgttgccgttcccacatgatgtgttttatgtgccggaatttcgcaagtatgacgaaatgtcatattccgaacgcattgaccagatccgcgacgaactgtctttgaacgaacgctctagtttagaggctttcattttattatgtagcggtggcaccctggaaaactccagctttggtgaatttctgcattggtgggcaatgtcgggttacacgtatcagggctgtatggattgtttaatctcctataaatttaaggatggccagagtgcgttcgcgcgtcgcttctgggaagaagccgctggcactggccgtctgggctatgtctttggttgtccggtgcgttctgtggtgaacgaacgcgacgcagtacgtgttaccgcacgtgacggtcgcgaattcgcagcgaaacgtttggtttgcacgattccgctgaacgtattgagttctgttcattttagcccaccactgtccccgcaacgcatggccgctgcgaacattggccatgttaaccagtgcgtcaaagtgcatgcggaagtcagttgtccggatatgcgttcatggtcgggtatctcctatccgttcaacaaattagcctacgctatcggcgatggcacgaccccagcgggtaatacgcatattgtgtgccttgggggggcccataatcatatccagccggaagaggacgtggaagcaacgaagatggccgttgaaaacatgtcgcctgggaatatggatatcaaacgtctggtcttccacaactggtgcaaggatgaatttgccaaaggcgcgtggttcttcgcccctccacagctgctgtcaaagagcctggatgaactgcgctgccgtcacggtaatgtcctgtttgcaaactccgattgggccttaggttggcgtggttttatcgatggtgctatcgaggagggcacccgcgcagcggttactgtaattgaggaactgcgtcctgcgcctgcggtgcgttcccacctg

SEQ ID NO: 238 - protein, 495 aa, synthetic construct
  REGION 1..495: note = Variant of monoamine oxidase
MTSRDGYQWTPETGLTQGVPSLGVISPPTNIEDTDKDGPWDVIVIGGGYCGLTATRDLTVAGFKTLLLEARDRIGGRSWSSNIDGYPYEMGGTWVHWHQSHVWREITRYKMHNALSPSFNFSRGVNHFQLRTNPTTSTYMTHEAEDELLRSALHKFTNVDGTNGRTVLPFPHDVFYVPEFRKYDEMSYSERIDQIRDELSLNERSSLEAFILLCSGGTLENSSFGEFLHWWAMSGYTYQGCMDCLISYKFKDGQSAFARRFWEEAAGTGRLGYVFGCPVRSVVNERDAVRVTARDGREFAAKRLVCTIPLNVLSSVHFSPPLSPQRMAAANIGHVNQCVKVHAEVSCPDMRSWSGISYPFNKLAYAIGDGTTPAGNTHIVCLGGAHNHIQPEEDVEATKMAVENMSPGNMDIKRLVFHNWCKDEFAKGAWFFAPPQLLSKSLDELRCRHGNVLFANSDWALGWRGFIDGAIEEGTRAAVTVIEELRPAPAVRSHL

SEQ ID NO: 239 - DNA, 1485 bp, synthetic construct
  misc_feature 1..1485: note = Variant of monoamine oxidase
  source 1..1485: mol_type = other DNA
atgaccagccgcgacggctatcagtggaccccggaaacgggtctgacccagggcgtaccgtccctgggtgtcatttcgccgccgactaacatcgaagataccgataaggacgggccttgggatgtcattgtcattgggggcgggtattgtgggctgaccgcaacccgtgatttaaccgtcgcagggttcaagacgctgctgctggaggcccgtgatcgtattggtggccgctcctggagcagtaatattgacggttacccgtatgagatgggtggcacttgggttcattggcatcaatctcacgtgtggcgtgaaatcacgcgttataaaatgcacaacgcgctgtctccatcatttaacttttcacgtggcgtgaatcacttccaactgcgtaccaatccgaccaccagtacgtacatgacgcacgaagcggaggatgaactggtgcgtagcgcattgcataaattcaccaatgtcgacggcactaatggccgtacagtgttgccgttcccacatgatatgttttatgtgccggaatttcgcaagtatgacgaaatgtcatattccgaacgcattgaccagatccgcgacgaactgtctttgaacgaacgctctagtttagaggctttcattttattatgtagcggtggcaccctggaaaactccagctttggtgaatttctgcattggtgggcaatgtcgggttacacgtatcagggctgtatggattgtttaatctcctataaatttaaggatggccagagtgcgttcgcgcgtcgcttctgggaagaagccgctggcactggccgtctgggctatgtctttggttgtccggtgcgttctgtggtgaacgaacgcgacgcagtacgtgttaccgcacgtgacggtcgcgaattcgcagcgaaacgtttggtttgcacgattccgctgaacgtattgagttctgttcattttagcccaccactgtccccgcaacgcatggccgctgcgaacattggccatgttaaccagtgcgtcaaagtgcatgcggaagtcagttgtccggatatgcgttcatggtcgggtatctcctatccgttcaacaaattagcctacgctatcggcgatggcacgaccccagcgggtaatacgcatattgtgtgccttgggggggcccataatcatatccagccggaagaggacgtggaagcaacgaagatggccgttgaaaacatgtcgcctgggaatatggatatcaaacgtctggtcttccacaactggtgcaaggatgaatttgccaaaggcgcgtggttcttcgcccctccacagctgctgtcaaagagcctggatgaactgcgctgccgtcacggtaatgtcctgtttgcaaactccgattgggccttaggttggcgtggttttatcgatggtgctatcgaggagggcacccgcgcagcggttactgtaattgaggaactgcgtcctgcgcctgcggtgcgttcccacctg

SEQ ID NO: 240 - protein, 495 aa, synthetic construct
  REGION 1..495: note = Variant of monoamine oxidase
MTSRDGYQWTPETGLTQGVPSLGVISPPTNIEDTDKDGPWDVIVIGGGYCGLTATRDLTVAGFKTLLLEARDRIGGRSWSSNIDGYPYEMGGTWVHWHQSHVWREITRYKMHNALSPSFNFSRGVNHFQLRTNPTTSTYMTHEAEDELVRSALHKFTNVDGTNGRTVLPFPHDMFYVPEFRKYDEMSYSERIDQIRDELSLNERSSLEAFILLCSGGTLENSSFGEFLHWWAMSGYTYQGCMDCLISYKFKDGQSAFARRFWEEAAGTGRLGYVFGCPVRSVVNERDAVRVTARDGREFAAKRLVCTIPLNVLSSVHFSPPLSPQRMAAANIGHVNQCVKVHAEVSCPDMRSWSGISYPFNKLAYAIGDGTTPAGNTHIVCLGGAHNHIQPEEDVEATKMAVENMSPGNMDIKRLVFHNWCKDEFAKGAWFFAPPQLLSKSLDELRCRHGNVLFANSDWALGWRGFIDGAIEEGTRAAVTVIEELRPAPAVRSHL

SEQ ID NO: 241 - DNA, 1485 bp, synthetic construct
  misc_feature 1..1485: note = Variant of monoamine oxidase
  source 1..1485: mol_type = other DNA
atgaccagccgcgacggctatcagtggaccccggaaacgggtctgacccagggcgtaccgtccctgggtgtcatttcgccgccgactaacatcgaagataccgataaggacgggccttgggatgtcattgtcattgggggcgggtattgtgggctgaccgcaacccgtgatttaaccgtcgcagggttcaagacgctgctgctggaggcccgtgatcgtattggtggccgctcctggagcagtaatattgacggttacccgtatgagatgggtggcacttgggttcattggcatcaatctcacgtgtggcgtgaaatcacgcgttataaaatgcacaacgcgctgtctccatcatttaacttttcacgtggcgtgaatcacttccaactgcgtaccaatccgaccaccagtacgtacatgacgcacgaagcggaggatgaactgctgcgtagcgcattgcataaattcaccaatgtcgacggcactaatggccgtacagtgttgccgttcccacatgatatgttttatgtgccggaatttcgcaagtatgacgaaatgtcatattccgaacgcattgaccagatccgcgacgaactgtctttgaacgaacgctctagtttagaggctttcattttattatgtagcggtggcaccctggaaaactccagctttggtgaatttctgcattggtgggcaatgtcgggttacacgtatcagggctgtatggattgtttaatctcctataaatttaaggatggccagagtgcgttcgcgcgtcgcttctgggaagaagccgctggcactggccgtctgggctatgtctttggttgtccggtgcgttctgtggtgaacgaacgcgacgcagtacgtgttaccgcacgtgacggtcgcgaattcgcagcgaaacgtttggtttgcacgattccgctgaacgtattgagttctgttcattttagcccaccactgtccccgcaacgcatggccgctgcgaacattggccatgttaaccagtgcgtcaaagtgcatgcggaagtcagttgtccggatatgcgttcatggtcgggtatctcctatccgttcaacaaattagcctacgctatcggcgatggcacgaccccagcgggtaatacgcatattgtgtgccttgggggggcccataatcatatccagccggaagaggacgtggaagcaacgaagatggccgttgaaaacatgtcgcctgggaatatggatatcaaacgtctggtcttccacaactggtgcaaggatgaatttgccaaaggcgcgtggttcttcgcccctccacagctgctgtcaaagcacctggatgaactgcgctgccgtcacggtaatgtcctgtttgcaaactccgattgggccttaggttggcgtggttttatcgatggtgctatcgaggagggcacccgcgcagcggttactgtaattgaggaactgcgtcctgcgcctgcggtgcgttcccacctg

SEQ ID NO: 242 - protein, 495 aa, synthetic construct
  REGION 1..495: note = Variant of monoamine oxidase
MTSRDGYQWTPETGLTQGVPSLGVISPPTNIEDTDKDGPWDVIVIGGGYCGLTATRDLTVAGFKTLLLEARDRIGGRSWSSNIDGYPYEMGGTWVHWHQSHVWREITRYKMHNALSPSFNFSRGVNHFQLRTNPTTSTYMTHEAEDELLRSALHKFTNVDGTNGRTVLPFPHDMFYVPEFRKYDEMSYSERIDQIRDELSLNERSSLEAFILLCSGGTLENSSFGEFLHWWAMSGYTYQGCMDCLISYKFKDGQSAFARRFWEEAAGTGRLGYVFGCPVRSVVNERDAVRVTARDGREFAAKRLVCTIPLNVLSSVHFSPPLSPQRMAAANIGHVNQCVKVHAEVSCPDMRSWSGISYPFNKLAYAIGDGTTPAGNTHIVCLGGAHNHIQPEEDVEATKMAVENMSPGNMDIKRLVFHNWCKDEFAKGAWFFAPPQLLSKHLDELRCRHGNVLFANSDWALGWRGFIDGAIEEGTRAAVTVIEELRPAPAVRSHL

SEQ ID NO: 243 - DNA, 1485 bp, synthetic construct
  misc_feature 1..1485: note = Variant of monoamine oxidase
  source 1..1485: mol_type = other DNA
atgaccagccgcgacggctatcagtggaccccggaaacgggtctgacccagggcgtaccgtccctgggtgtcatttcgccgccgactaacatcgaggataccgataaggacgggccttgggatgtcattgtcattgggggcgggtattgtgggctgaccgcaacccgtgatttaaccgtcgcagggttcaaggtactgctgctggaggcccgtgatcgtattggtggccgctcctggagcagtaatattgacggttacccgtatgagatgggtggcacttgggttcattggcatcaatctcacgtgtggcgtgaaatcacgcgttataaaatgcacaacgcgctgtctccatcatttaacttttcacgtggcgtgaatcacttccaactgcgtaccaatccgcaaaccagtacgtacatgacgcacgaagcggaggatgaactgctgcgtagcgcattgcataaattcaccaatgtcgacggcactaatggccgtacagtgttgccgttcccacatgatatgttttatgtgccggaatttcgcaagtatgacgaaatgtcatattcggagcgcattgaccagatccgcgacgaactgtctttgaacgaacgctctagtttagaggctttcattttattatgtagcggtggcaccctggaaaactccagctttggtgaatttctgcattggtgggcaatgtcgggttacacgtatcagggctgtatggattgtttaatttcctataaatttaaggatggccagagtgcgttcgcgcgtcgcttctgggaagaagccgctggcactggccgtctgggctatgtctttggttgtccggtgcgttctgtggtgaacgaacgcgacgcagtacgtgttaccgcacgtgacggtcgcgaattcgcagcgaaacgtttggtttgcacgattccgctgaacgtattgagttctgttcattttagcccaccactgtccccgcaacgcatggccgctgcgaacattggccatgttaatcagtgcgtcaaagtgcatgcggaagtcagttgtccggatatgcgttcatggtcgggtatctcctatccgttcaacaaattagcctacgctatcggcgatggcacgaccccagcgggtaatacgcatattgtgtgccttgggggggcccataatcatatccagccggaagaggacgtggaagcaacgaagatggccgttgaaaacatgtcgcctgggaatatggatatcaaacgtctggtcttccacaactggtgcaaggatgaatttgccaaaggcgcgtggttcttcgcccctccacagctgctgtcaaagagcctggatgaactgcgctgccgtcacggtaatgtcctgtttgcaaactccgattgggccttaggttggcgtggttttatcgatggtgctatcgaggagggcacccgcgcagcggttactgtaattgaggaactgcgtcctgcgcctgcggtgcgttcccacctg

SEQ ID NO: 244 - protein, 495 aa, synthetic construct
  REGION 1..495: note = Variant of monoamine oxidase
MTSRDGYQWTPETGLTQGVPSLGVISPPTNIEDTDKDGPWDVIVIGGGYCGLTATRDLTVAGFKVLLLEARDRIGGRSWSSNIDGYPYEMGGTWVHWHQSHVWREITRYKMHNALSPSFNFSRGVNHFQLRTNPQTSTYMTHEAEDELLRSALHKFTNVDGTNGRTVLPFPHDMFYVPEFRKYDEMSYSERIDQIRDELSLNERSSLEAFILLCSGGTLENSSFGEFLHWWAMSGYTYQGCMDCLISYKFKDGQSAFARRFWEEAAGTGRLGYVFGCPVRSVVNERDAVRVTARDGREFAAKRLVCTIPLNVLSSVHFSPPLSPQRMAAANIGHVNQCVKVHAEVSCPDMRSWSGISYPFNKLAYAIGDGTTPAGNTHIVCLGGAHNHIQPEEDVEATKMAVENMSPGNMDIKRLVFHNWCKDEFAKGAWFFAPPQLLSKSLDELRCRHGNVLFANSDWALGWRGFIDGAIEEGTRAAVTVIEELRPAPAVRSHL

SEQ ID NO: 245 - DNA, 1485 bp, synthetic construct
  misc_feature 1..1485: note = Variant of monoamine oxidase
  source 1..1485: mol_type = other DNA
atgaccagccgcgacggctatcagtggaccccggaaacgggtctgacccagggcgtaccgtccctgggtgtcatttcgccgccgactaacatcgaagataccgataaggacgggccttgggatgtcattgtcattgggggcgggtattgtgggctgaccgcaacccgtgatttaaccgtcgcagggttcaagacgctgctgctggaggcccgtgatcgtattggtggccgctcctggagcagtaatattgacggttacccgtatgagatgggtggcacttgggttcattggcatcaatctcacgtgtggcgtgaaatcacgcgttataaaatgcacaacgcgctgtctccatcatttaacttttcacgtggcgtgaatcacttccaactgcgtaccaatccgaccaccagtacgtacatgacgcacgaagcggaggatgaactgctgcgtagcgcattgcattgtttcaccaatgtcgacggcactaatggccgtacagtgttgccgttcccacatgatatgttttatgtgccggaatttcgcaagtatgacgaaatgtcatattccgaacgcattgaccagatccgcgacgaactgtctttgaacgaacgctctagtttagaggctttcattttattatgtagcggtggcaccctggaaaactccagctttggtgaatttctgcattggtgggcaatgtcgggttacacgtatcagggctgtatggattgtttaatctcctataaatttaaggatggccagagtgcgttcgcgcgtcgcttctgggaagaagccgctggcactggccgtctgggctatgtctttggttgtccggtgcgttctgtggtgaacgaacgcgacgcagtacgtgttaccgcacgtgacggtcgcgaattcgcagcgaaacgtttggtttgcacgattccgctgaacgtattgagttctgttcattttagcccaccactgtccccgcaacgcatggccgctgcgaacattggccatgttaaccagtgcgtcaaagtgcatgcggaagtcagttgtccggatatgcgttcatggtcgggtatctcctatccgttcaacaaattagcctacgctatcggcgatggcacgaccccagcgggtaatacgcatattgtgtgccttgggggggcccataatcatatccagccggaagaggacgtggaagcaacgaagatggccgttgaaaacatgtcgcctgggaatatggatatcaaacgtctggtcttccacaactggtgcaaggatgaatttgccaaaggcgcgtggttcttcgcccctccacagctgctgtcaaagagcctggatgaactgcgctgccgtcacggtaatgtcctgtttgcaaactccgattgggccttaggttggcgtggttttatcgatggtgctatcgaggagggcacccgcgcagcggttactgtaattgaggaactgcgtcctgcgcctgcggtgcgttcccacctg

SEQ ID NO: 246 - protein, 495 aa, synthetic construct
  REGION 1..495: note = Variant of monoamine oxidase
MTSRDGYQWTPETGLTQGVPSLGVISPPTNIEDTDKDGPWDVIVIGGGYCGLTATRDLTVAGFKTLLLEARDRIGGRSWSSNIDGYPYEMGGTWVHWHQSHVWREITRYKMHNALSPSFNFSRGVNHFQLRTNPTTSTYMTHEAEDELLRSALHCFTNVDGTNGRTVLPFPHDMFYVPEFRKYDEMSYSERIDQIRDELSLNERSSLEAFILLCSGGTLENSSFGEFLHWWAMSGYTYQGCMDCLISYKFKDGQSAFARRFWEEAAGTGRLGYVFGCPVRSVVNERDAVRVTARDGREFAAKRLVCTIPLNVLSSVHFSPPLSPQRMAAANIGHVNQCVKVHAEVSCPDMRSWSGISYPFNKLAYAIGDGTTPAGNTHIVCLGGAHNHIQPEEDVEATKMAVENMSPGNMDIKRLVFHNWCKDEFAKGAWFFAPPQLLSKSLDELRCRHGNVLFANSDWALGWRGFIDGAIEEGTRAAVTVIEELRPAPAVRSHL

SEQ ID NO: 247 - DNA, 1485 bp, synthetic construct
  misc_feature 1..1485: note = Variant of monoamine oxidase
  source 1..1485: mol_type = other DNA
atgaccagccgcgacggctatcagtggaccccggaaacgggtctgacccagggcgtaccgtccctgggtgtcatttcgccgccgactaacatcgaagataccgataaggacgggccttgggatgtcattgtcattgggggcgggtattgtgggctgaccgcaacccgtgatttaaccgtcgcagggttcaagacgctgctgctggaggcccgtgatcgtattggtggccgctcctggagcagtaatattgacggttacccgtatgagatgggtggcacttgggttcattggcatcaatctcacgtgtggcgtgaaatcacgcgttataaaatgcacaacgcgctgtctccatcatttaacttttcacgtggcgtgaatcacttccaactgcgtaccaatccgaccaccagtacgtacatgacgcacgaagcggaggatgaactgctgcgtagcgcattgcataaattcaccaatgtcgacggcactaatggccgtacagtgttgccgttcccacatgatatgttttatgtgccggaatttcgcaagtatgacgaaatgtcatattccgaacgcattgaccagatccgcgacgaactgtctttgaacgaacgctctagtttagaggctttcattttattatgtagcggtggcaccctggaaaactccagctttggtgaatttctgcattggtgggcaatgtcgggttacacgtatcagggctgtatggattgtttaatctcctataaatttaaggatggccagagtgcgttcgcgcgtcgcttctgggaagaagccgctggcactggccgtctgggctatgtctttggttgtccggtgcgttctgtggtgaacgaacgcgacgcagtacgtgttaccgcacgtgacggtcgcgaattcgcagcgaaacgtttggttgttacgattccgctgaacgtattgagttctgttcattttagcccaccactgtccccgcaacgcatggccgctgcgaacattggccatgttaaccagtgcgtcaaagtgcatgcggaagtcagttgtccggatatgcgttcatggtcgggtatctcctatccgttcaacaaattagcctacgctatcggcgatggcacgaccccagcgggtaatacgcatattgtgtgccttgggggggcccataatcatatccagccggaagaggacgtggaagcaacgaagatggccgttgaaaacatgtcgcctgggaatatggatatcaaacgtctggtcttccacaactggtgcaaggatgaatttgccaaaggcgcgtggttcttcgcccctccacagctgctgtcaaagagcctggatgaactgcgctgccgtcacggtaatgtcctgtttgcaaactccgattgggccttaggttggcgtggttttatcgatggtgctatcgaggagggcacccgcgcagcggttactgtaattgaggaactgcgtcctgcgcctgcggtgcgttcccacctg

SEQ ID NO: 248 - protein, 495 aa, synthetic construct
  REGION 1..495: note = Variant of monoamine oxidase
MTSRDGYQWTPETGLTQGVPSLGVISPPTNIEDTDKDGPWDVIVIGGGYCGLTATRDLTVAGFKTLLLEARDRIGGRSWSSNIDGYPYEMGGTWVHWHQSHVWREITRYKMHNALSPSFNFSRGVNHFQLRTNPTTSTYMTHEAEDELLRSALHKFTNVDGTNGRTVLPFPHDMFYVPEFRKYDEMSYSERIDQIRDELSLNERSSLEAFILLCSGGTLENSSFGEFLHWWAMSGYTYQGCMDCLISYKFKDGQSAFARRFWEEAAGTGRLGYVFGCPVRSVVNERDAVRVTARDGREFAAKRLVVTIPLNVLSSVHFSPPLSPQRMAAANIGHVNQCVKVHAEVSCPDMRSWSGISYPFNKLAYAIGDGTTPAGNTHIVCLGGAHNHIQPEEDVEATKMAVENMSPGNMDIKRLVFHNWCKDEFAKGAWFFAPPQLLSKSLDELRCRHGNVLFANSDWALGWRGFIDGAIEEGTRAAVTVIEELRPAPAVRSHL

SEQ ID NO: 249 - DNA, 1485 bp, synthetic construct
  misc_feature 1..1485: note = Variant of monoamine oxidase
  source 1..1485: mol_type = other DNA
atgaccagccgcgacggctatcagtggaccccggaaacgggtctgacccagggcgtaccgtccctgggtgtcatttcgccgccgactaacatcgaagataccgataaggacgggccttgggatgtcattgtcattgggggcgggtattgtgggctgaccgcaacccgtgatttaaccgtcgcagggttcaagacgctgctgctggaggcccgtgatcgtattggtggccgctcctggagcagtaatattgacggttacccgtatgagatgggtggcacttgggttcattggcatcaatctcacgtgtggcgtgaaatcacgcgttataaaatgcacaacgcgctgtctccatcatttaacttttcacgtggcgtgaatcacttccaactgcgtaccaatccgaccaccagtacgtacatgacgcacgaagcggaggatgaactgctgcgtagcgcattgcataaattcaccaatgtcgacggcactaatggccgtacagtgttgccgttcccacatgatatgttttatgtgccggaatttcgcaagtatgacgaaatgtcatattccgaacgcattgaccagatccgcgacgaactgtctttgaacgaacgctctagtttagaggctttcattttattatgtagcggtggcaccctggaaaactccagctttggtgaatttctgcattggtgggcaatgtcgggttacacgtatcagggctgtatggattgtttaatctcctataaatttaaggatggccagagtgcgttcgcgcgtgtgttctgggaagaagccgctggcactggccgtctgggctatgtctttggttgtccggtgcgttctgtggtgaacgaacgcgacgcagtacgtgttaccgcacgtgacggtcgcgaattcgcagcgaaacgtttggtttgcacgattccgctgaacgtattgagttctgttcattttagcccaccactgtccccgcaacgcatggccgctgcgaacattggccatgttaaccagtgcgtcaaagtgcatgcggaagtcagttgtccggatatgcgttcatggtcgggtatctcctatccgttcaacaaattagcctacgctatcggcgatggcacgaccccagcgggtaatacgcatattgtgtgccttgggggggcccataatcatatccagccggaagaggacgtggaagcaacgaagatggccgttgaaaacatgtcgcctgggaatatggatatcaaacgtctggtcttccacaactggtgcaaggatgaatttgccaaaggcgcgtggttcttcgcccctccacagctgctgtcaaagagcctggatgaactgcgctgccgtcacggtaatgtcctgtttgcaaactccgattgggccttaggttggcgtggttttatcgatggtgctatcgaggagggcacccgcgcagcggttactgtaattgaggaactgcgtcctgcgcctgcggtgcgttcccacctg

SEQ ID NO: 250 - protein, 495 aa, synthetic construct
  REGION 1..495: note = Variant of monoamine oxidase
MTSRDGYQWTPETGLTQGVPSLGVISPPTNIEDTDKDGPWDVIVIGGGYCGLTATRDLTVAGFKTLLLEARDRIGGRSWSSNIDGYPYEMGGTWVHWHQSHVWREITRYKMHNALSPSFNFSRGVNHFQLRTNPTTSTYMTHEAEDELLRSALHKFTNVDGTNGRTVLPFPHDMFYVPEFRKYDEMSYSERIDQIRDELSLNERSSLEAFILLCSGGTLENSSFGEFLHWWAMSGYTYQGCMDCLISYKFKDGQSAFARVFWEEAAGTGRLGYVFGCPVRSVVNERDAVRVTARDGREFAAKRLVCTIPLNVLSSVHFSPPLSPQRMAAANIGHVNQCVKVHAEVSCPDMRSWSGISYPFNKLAYAIGDGTTPAGNTHIVCLGGAHNHIQPEEDVEATKMAVENMSPGNMDIKRLVFHNWCKDEFAKGAWFFAPPQLLSKSLDELRCRHGNVLFANSDWALGWRGFIDGAIEEGTRAAVTVIEELRPAPAVRSHL

SEQ ID NO: 251 - DNA, 1485 bp, synthetic construct
  misc_feature 1..1485: note = Variant of monoamine oxidase
  source 1..1485: mol_type = other DNA
atgaccagccgcgacggctatcagtggaccccggaaacgggtctgacccagggcgtaccgtccctgggtgtcatttcgccgccgactaacatcgaagataccgataaggacgggccttgggatgtcattgtcattgggggcgggtattgtgggctgaccgcaacccgtgatttaaccgtcgcagggttcaagacgctgctgctggaggcccgtgatcgtattggtggccgctcctggagcagtaatattgacggttacccgtatgagatgggtggcacttgggttcattggcatcaatctcacgtgtggcgtgaaatcacgcgttataaaatgcacaacgcgctgtctccatcatttaacttttcacgtggcgtgaatcacttccaactgcgtaccaatccgaccaccagtacgtacatgacgcacgaagcggaggatgaactgctgcgtagcgcattgcataaattcaccaatgtcgacggcactaatggccgtacagtgttgccgttcccacatgatatgttttatgtgccggaatttcgcaagtatgacgaaatgtcatattccgaacgcattgaccagatccgcgacgaactgtctttgaacgaacgctctagtttagaggctttcattttattatgtagcggtggcaccctggaaaactccagctttggtgaatttctgcattggtgggcaatgtcgggttacacgtatcagggctgtatggattgtttaatctcctataaatttaaggatggccagagtgcgttcgcgcgtcgcttctgggaagaagccgctggcactggccgtctgggctatgtctttggttgtccggtgcgttctgtggtgaacgaacgcgacgcagtacgtgttaccgcacgtgacggtcgcgaattccgtgcgaaacgtttggtttgcacgattccgctgaacgtattgagttctgttcattttagcccaccactgtccccgcaacgcatggccgctgcgaacattggccatgttaaccagtgcgtcaaagtgcatgcggaagtcagttgtccggatatgcgttcatggtcgggtatctcctatccgttcaacaaattagcctacgctatcggcgatggcacgaccccagcgggtaatacgcatattgtgtgccttgggggggcccataatcatatccagccggaagaggacgtggaagcaacgaagatggccgttgaaaacatgtcgcctgggaatatggatatcaaacgtctggtcttccacaactggtgcaaggatgaatttgccaaaggcgcgtggttcttcgcccctccacagctgctgtcaaagagcctggatgaactgcgctgccgtcacggtaatgtcctgtttgcaaactccgattgggccttaggttggcgtggttttatcgatggtgctatcgaggagggcacccgcgcagcggttactgtaattgaggaactgcgtcctgcgcctgcggtgcgttcccacctg

SEQ ID NO: 252 - protein, 495 aa, synthetic construct
  REGION 1..495: note = Variant of monoamine oxidase
MTSRDGYQWTPETGLTQGVPSLGVISPPTNIEDTDKDGPWDVIVIGGGYCGLTATRDLTVAGFKTLLLEARDRIGGRSWSSNIDGYPYEMGGTWVHWHQSHVWREITRYKMHNALSPSFNFSRGVNHFQLRTNPTTSTYMTHEAEDELLRSALHKFTNVDGTNGRTVLPFPHDMFYVPEFRKYDEMSYSERIDQIRDELSLNERSSLEAFILLCSGGTLENSSFGEFLHWWAMSGYTYQGCMDCLISYKFKDGQSAFARRFWEEAAGTGRLGYVFGCPVRSVVNERDAVRVTARDGREFRAKRLVCTIPLNVLSSVHFSPPLSPQRMAAANIGHVNQCVKVHAEVSCPDMRSWSGISYPFNKLAYAIGDGTTPAGNTHIVCLGGAHNHIQPEEDVEATKMAVENMSPGNMDIKRLVFHNWCKDEFAKGAWFFAPPQLLSKSLDELRCRHGNVLFANSDWALGWRGFIDGAIEEGTRAAVTVIEELRPAPAVRSHL

SEQ ID NO: 253 - DNA, 1485 bp, synthetic construct
  misc_feature 1..1485: note = Variant of monoamine oxidase
  source 1..1485: mol_type = other DNA
atgaccagccgcgacggctatcagtggaccccggaaacgggtctgacccagggcgtaccgtccctgggtgtcatttcgccgccgactaacatcgaagataccgataaggacgggccttgggatgtcattgtcattgggggcgggtattgtgggctgaccgcaacccgtgatttaaccgtcgcagggttcaagacgctgctgctggaggcccgtgatcgtattggtggccgctcctggagcagtaatattgacggttacccgtatgagatgggtggcacttgggttcattggcatcaatctcacgtgtggcgtgaaatcacgcgttataaaatgcacaacgcgctgtctccatcatttaacttttcacgtggcgtgaatcacttccaactgcgtaccaatccgaccaccagtacgtacatgacgcacgaagcggaggatgaactgctgcgtagcgcattgcataaattcaccaatgtcgacggcactaatggccgtacagtgttgccgttcccacatgatatgttttatgggccggaatttcgcaagtatgacgaaatgtcatattccgaacgcattgaccagatccgcgacgaactgtctttgaacgaacgctctagtttagaggctttcattttattatgtagcggtggcaccctggaaaactccagctttggtgaatttctgcattggtgggcaatgtcgggttacacgtatcagggctgtatggattgtttaatctcctataaatttaaggatggccagagtgcgttcgcgcgtcgcttctgggaagaagccgctggcactggccgtctgggctatgtctttggttgtccggtgcgttctgtggtgaacgaacgcgacgcagtacgtgttaccgcacgtgacggtcgcgaattcgcagcgaaacgtttggtttgcacgattccgctgaacgtattgagttctgttcattttagcccaccactgtccccgcaacgcatggccgctgcgaacattggccatgttaaccagtgcgtcaaagtgcatgcggaagtcagttgtccggatatgcgttcatggtcgggtatctcctatccgttcaacaaattagcctacgctatcggcgatggcacgaccccagcgggtaatacgcatattgtgtgccttgggggggcccataatcatatccagccggaagaggacgtggaagcaacgaagatggccgttgaaaacatgtcgcctgggaatatggatatcaaacgtctggtcttccacaactggtgcaaggatgaatttgccaaaggcgcgtggttcttcgcccctccacagctgctgtcaaagagcctggatgaactgcgctgccgtcacggtaatgtcctgtttgcaaactccgattgggccttaggttggcgtggttttatcgatggtgctatcgaggagggcacccgcgcagcggttactgtaattgaggaactgcgtcctgcgcctgcggtgcgttcccacctg

SEQ ID NO: 254 - protein, 495 aa, synthetic construct
  REGION 1..495: note = Variant of monoamine oxidase
MTSRDGYQWTPETGLTQGVPSLGVISPPTNIEDTDKDGPWDVIVIGGGYCGLTATRDLTVAGFKTLLLEARDRIGGRSWSSNIDGYPYEMGGTWVHWHQSHVWREITRYKMHNALSPSFNFSRGVNHFQLRTNPTTSTYMTHEAEDELLRSALHKFTNVDGTNGRTVLPFPHDMFYGPEFRKYDEMSYSERIDQIRDELSLNERSSLEAFILLCSGGTLENSSFGEFLHWWAMSGYTYQGCMDCLISYKFKDGQSAFARRFWEEAAGTGRLGYVFGCPVRSVVNERDAVRVTARDGREFAAKRLVCTIPLNVLSSVHFSPPLSPQRMAAANIGHVNQCVKVHAEVSCPDMRSWSGISYPFNKLAYAIGDGTTPAGNTHIVCLGGAHNHIQPEEDVEATKMAVENMSPGNMDIKRLVFHNWCKDEFAKGAWFFAPPQLLSKSLDELRCRHGNVLFANSDWALGWRGFIDGAIEEGTRAAVTVIEELRPAPAVRSHL

SEQ ID NO: 255 - DNA, 1485 bp, synthetic construct
  misc_feature 1..1485: note = Variant of monoamine oxidase
  source 1..1485: mol_type = other DNA
atgaccagccgcgacggctatcagtggaccccggaaacgggtctgacccagggcgtaccgtccctgggtgtcatttcgccgccgactaacatcgaagataccgataaggacgggccttgggatgtcattgtcattgggggcgggtattgtgggctgaccgcaacccgtgatttaaccgtcgcagggttcaagacgctgctgctggaggcccgtgatcgtattggtggccgctcctggagcagtaatattgacggttacccgtatgagatgggtggcacttgggttcattggcatcaatctcacgtgtggcgtgaaatcacgcgttataaaatgcacaacgcgctgtctccatcatttaacttttcacgtggcgtgaatcacttccaactgcgtaccaatccgaccaccagtacgtacatgacgcacgaagcggaggatgaactgctgcgtagcgcattgcataggttcaccaatgtcgacggcactaatggccgtacagtgttgccgttcccacatgatatgttttatgtgccggaatttcgcaagtatgacgaaatgtcatattccgaacgcattgaccagatccgcgacgaactgtctttgaacgaacgctctagtttagaggctttcattttattatgtagcggtggcaccctggaaaactccagctttggtgaatttctgcattggtgggcaatgtcgggttacacgtatcagggctgtatggattgtttaatctcctataaatttaaggatggccagagtgcgttcgcgcgtcgcttctgggaagaagccgctggcactggccgtctgggctatgtctttggttgtccggtgcgttctgtggtgaacgaacgcgacgcagtacgtgttaccgcacgtgacggtcgcgaattcgcagcgaaacgtttggtttgcacgattccgctgaacgtattgagttctgttcattttagcccaccactgtccccgcaacgcatggccgctgcgaacattggccatgttaaccagtgcgtcaaagtgcatgcggaagtcagttgtccggatatgcgttcatggtcgggtatctcctatccgttcaacaaattagcctacgctatcggcgatggcacgaccccagcgggtaatacgcatattgtgtgccttgggggggcccataatcatatccagccggaagaggacgtggaagcaacgaagatggccgttgaaaacatgtcgcctgggaatatggatatcaaacgtctggtcttccacaactggtgcaaggatgaatttgccaaaggcgcgtggttcttcgcccctccacagctgctgtcaaagagcctggatgaactgcgctgccgtcacggtaatgtcctgtttgcaaactccgattgggccttaggttggcgtggttttatcgatggtgctatcgaggagggcacccgcgcagcggttactgtaattgaggaactgcgtcctgcgcctgcggtgcgttcccacctg

SEQ ID NO: 256 - protein, 495 aa, synthetic construct
  REGION 1..495: note = Variant of monoamine oxidase
MTSRDGYQWTPETGLTQGVPSLGVISPPTNIEDTDKDGPWDVIVIGGGYCGLTATRDLTVAGFKTLLLEARDRIGGRSWSSNIDGYPYEMGGTWVHWHQSHVWREITRYKMHNALSPSFNFSRGVNHFQLRTNPTTSTYMTHEAEDELLRSALHRFTNVDGTNGRTVLPFPHDMFYVPEFRKYDEMSYSERIDQIRDELSLNERSSLEAFILLCSGGTLENSSFGEFLHWWAMSGYTYQGCMDCLISYKFKDGQSAFARRFWEEAAGTGRLGYVFGCPVRSVVNERDAVRVTARDGREFAAKRLVCTIPLNVLSSVHFSPPLSPQRMAAANIGHVNQCVKVHAEVSCPDMRSWSGISYPFNKLAYAIGDGTTPAGNTHIVCLGGAHNHIQPEEDVEATKMAVENMSPGNMDIKRLVFHNWCKDEFAKGAWFFAPPQLLSKSLDELRCRHGNVLFANSDWALGWRGFIDGAIEEGTRAAVTVIEELRPAPAVRSHL

SEQ ID NO: 257 - DNA, 1485 bp, synthetic construct
  misc_feature 1..1485: note = Variant of monoamine oxidase
  source 1..1485: mol_type = other DNA
atgaccagccgcgacggctatcagtggaccccggaaacgggtctgacccagggcgtaccgtccctgggtgtcatttcgccgccgactaacatcgaagataccgataaggacgggccttgggatgtcattgtcattgggggcgggtattgtgggctgaccgcaacccgtgatttaaccgtcgcagggttcaagacgctgctgctggaggcccgtgatcgtattggtggccgctcctggagcagtaatattgacggttacccgtatgagatgggtggcacttgggttcattggcatcaatctcacgtgtggcgtgaaatcacgcgttataaaatgcacaacgcgctgtctccatcatttaacttttcacgtggcgtgaatcacttccaactgcgtaccaatccgaccaccagtacgtacatgacgcacgaagcggaggatgaactgctgcgtagcgcattgcataaattcaccaatgtcgacggcactaatggccgtacagtgttgccgttcccacatgatatgttttatgtgccggaatttcgcaagtatgacgaaatgtcatattccgaacgcattgaccagatccgcgacgaactgtctttgaacgaacgctctagtttagaggctttcattttattatgtagcggtggcaccctggaaaactccagctttggtgaatttctgcattggtgggcaatgtcgggttacacgtatcagggctgtatggattgtttaatctcctataaatttaaggatggccagagtgcgttcgcgcgtcgcttctgggaagaagccgctggcactggccgtctgggctatgtctttggttgtccggtgcgttctgtggtgaacgaacgcgacgcagtacgtgttaccgcacgtgacggtcgcgaattcgcagcgaaacgtttggtttgcacgattccgctgaacgtattgagttctgttcattttagcccaccactgtccccgcaacgcatggccgctgcgaacattggccatgttaaccagtgcgtcaaagtgcatgcggaagtcagttgtccggatatgcgttcatggtcgggtatctcctatccgttcaacaaattagcctacgctatcggcgatggcacgaccccagcgggtaatacgcatattgtgtgccttgggggggcccataatcatatccagccggaagaggacgtggaagcaacgaagatggccgttgaaaacatgtcgcctgggaatatggatatcaaacgtctggtcttccacaactggtgcaaggatgaatttgccaaaggcgcgtggttcttcgcccctccacagctgctgtcaaagagcctggatgaactgcgctgccgtcacggtaatgtcctgtttgcaaactccgattgggccttaggttggcgtggttttatcgatggtgctatcgaggagggcgagcgcgcagcggttactgtaattgaggaactgcgtcctgcgcctgcggtgcgttcccacctg

SEQ ID NO: 258 - protein, 495 aa, synthetic construct
  REGION 1..495: note = Variant of monoamine oxidase
MTSRDGYQWTPETGLTQGVPSLGVISPPTNIEDTDKDGPWDVIVIGGGYCGLTATRDLTVAGFKTLLLEARDRIGGRSWSSNIDGYPYEMGGTWVHWHQSHVWREITRYKMHNALSPSFNFSRGVNHFQLRTNPTTSTYMTHEAEDELLRSALHKFTNVDGTNGRTVLPFPHDMFYVPEFRKYDEMSYSERIDQIRDELSLNERSSLEAFILLCSGGTLENSSFGEFLHWWAMSGYTYQGCMDCLISYKFKDGQSAFARRFWEEAAGTGRLGYVFGCPVRSVVNERDAVRVTARDGREFAAKRLVCTIPLNVLSSVHFSPPLSPQRMAAANIGHVNQCVKVHAEVSCPDMRSWSGISYPFNKLAYAIGDGTTPAGNTHIVCLGGAHNHIQPEEDVEATKMAVENMSPGNMDIKRLVFHNWCKDEFAKGAWFFAPPQLLSKSLDELRCRHGNVLFANSDWALGWRGFIDGAIEEGERAAVTVIEELRPAPAVRSHL

SEQ ID NO: 259 - DNA, 1485 bp, synthetic construct
  misc_feature 1..1485: note = Variant of monoamine oxidase
  source 1..1485: mol_type = other DNA
atgaccagccgcgacggctatcagtggaccccggaaacgggtctgacccagggcgtaccgtccctgggtgtcatttcgccgccgactaacatcgaagataccgataaggacgggccttgggatgtcattgtcattgggggcgggtattgtgggctgaccgcaacccgtgatttaaccgtcgcagggttcaagacgctgctgctggaggcccgtgatcgtattggtggccgctcctggagcagtaatattgacggttacccgtatgagatgggtggcacttgggttcattggcatcaatctcacgtgtggcgtgaaatcacgcgttataaaatgcacaacgcgctgtctccatcatttaacttttcacgtggcgtgaatgatttccaactgcgtaccaatccgaccaccagtacgtacatgacgcacgaagcggaggatgaactgctgcgtagcgcattgcataaattcaccaatgtcgacggcactaatggccgtacagtgttgccgttcccacatgatatgttttatgtgccggaatttcgcaagtatgacgaaatgtcatattccgaacgcattgaccagatccgcgacgaactgtctttgaacgaacgctctagtttagaggctttcattttattatgtagcggtggcaccctggaaaactccagctttggtgaatttctgcattggtgggcaatgtcgggttacacgtatcagggctgtatggattgtttaatctcctataaatttaaggatggccagagtgcgttcgcgcgtcgcttctgggaagaagccgctggcactggccgtctgggctatgtctttggttgtccggtgcgttctgtggtgaacgaacgcgacgcagtacgtgttaccgcacgtgacggtcgcgaattcgcagcgaaacgtttggtttgcacgattccgctgaacgtattgagttctgttcattttagcccaccactgtccccgcaacgcatggccgctgcgaacattggccatgttaaccagtgcgtcaaagtgcatgcggaagtcagttgtccggatatgcgttcatggtcgggtatctcctatccgttcaacaaattagcctacgctatcggcgatggcacgaccccagcgggtaatacgcatattgtgtgccttgggggggcccataatcatatccagccggaagaggacgtggaagcaacgaagatggccgttgaaaacatgtcgcctgggaatatggatatcaaacgtctggtcttccacaactggtgcaaggatgaatttgccaaaggcgcgtggttcttcgcccctccacagctgctgtcaaagagcctggatgaactgcgctgccgtcacggtaatgtcctgtttgcaaactccgattgggccttaggttggcgtggttttatcgatggtgctatcgaggagggcacccgcgcagcggttactgtaattgaggaactgcgtcctgcgcctgcggtgcgttcccacctg

SEQ ID NO: 260 - protein, 495 aa, synthetic construct
  REGION 1..495: note = Variant of monoamine oxidase
MTSRDGYQWTPETGLTQGVPSLGVISPPTNIEDTDKDGPWDVIVIGGGYCGLTATRDLTVAGFKTLLLEARDRIGGRSWSSNIDGYPYEMGGTWVHWHQSHVWREITRYKMHNALSPSFNFSRGVNDFQLRTNPTTSTYMTHEAEDELLRSALHKFTNVDGTNGRTVLPFPHDMFYVPEFRKYDEMSYSERIDQIRDELSLNERSSLEAFILLCSGGTLENSSFGEFLHWWAMSGYTYQGCMDCLISYKFKDGQSAFARRFWEEAAGTGRLGYVFGCPVRSVVNERDAVRVTARDGREFAAKRLVCTIPLNVLSSVHFSPPLSPQRMAAANIGHVNQCVKVHAEVSCPDMRSWSGISYPFNKLAYAIGDGTTPAGNTHIVCLGGAHNHIQPEEDVEATKMAVENMSPGNMDIKRLVFHNWCKDEFAKGAWFFAPPQLLSKSLDELRCRHGNVLFANSDWALGWRGFIDGAIEEGTRAAVTVIEELRPAPAVRSHL

SEQ ID NO: 261 - DNA, 1485 bp, synthetic construct
  misc_feature 1..1485: note = Variant of monoamine oxidase
  source 1..1485: mol_type = other DNA
atgaccagccgcgacggctatcagtggaccccggaaacgggtctgacccagggcgtaccgtccctgggtgtcatttcgccgccgactaacatcgaagataccgataaggacgggccttgggatgtcattgtcattgggggcgggtattgtgggctgaccgcaacccgtgatttaaccgtcgcagggttcaagacgctgctgctggaggcccgtgatcgtattggtggccgctcctggagcagtttgattgacggttacccgtatgagatgggtggcacttgggttcattggcatcaatctcacgtgtggcgtgaaatcacgcgttataaaatgcacaacgcgctgtctccatcatttaacttttcacgtggcgtgaatcacttccaactgcgtaccaatccgaccaccagtacgtacatgacgcacgaagcggaggatgaactgctgcgtagcgcattgcataaattcaccaatgtcgacggcactaatggccgtacagtgttgccgttcccacatgatatgttttatgtgccggaatttcgcaagtatgacgaaatgtcatattccgaacgcattgaccagatccgcgacgaactgtctttgaacgaacgctctagtttagaggctttcattttattatgtagcggtggcaccctggaaaactccagctttggtgaatttctgcattggtgggcaatgtcgggttacacgtatcagggctgtatggattgtttaatctcctataaatttaaggatggccagagtgcgttcgcgcgtcgcttctgggaagaagccgctggcactggccgtctgggctatgtctttggttgtccggtgcgttctgtggtgaacgaacgcgacgcagtacgtgttaccgcacgtgacggtcgcgaattcgcagcgaaacgtttggtttgcacgattccgctgaacgtattgagttctgttcattttagcccaccactgtccccgcaacgcatggccgctgcgaacattggccatgttaaccagtgcgtcaaagtgcatgcggaagtcagttgtccggatatgcgttcatggtcgggtatctcctatccgttcaacaaattagcctacgctatcggcgatggcacgaccccagcgggtaatacgcatattgtgtgccttgggggggcccataatcatatccagccggaagaggacgtggaagcaacgaagatggccgttgaaaacatgtcgcctgggaatatggatatcaaacgtctggtcttccacaactggtgcaaggatgaatttgccaaaggcgcgtggttcttcgcccctccacagctgctgtcaaagagcctggatgaactgcgctgccgtcacggtaatgtcctgtttgcaaactccgattgggccttaggttggcgtggttttatcgatggtgctatcgaggagggcacccgcgcagcggttactgtaattgaggaactgcgtcctgcgcctgcggtgcgttcccacctg

SEQ ID NO: 262 - protein, 495 aa, synthetic construct
  REGION 1..495: note = Variant of monoamine oxidase
MTSRDGYQWTPETGLTQGVPSLGVISPPTNIEDTDKDGPWDVIVIGGGYCGLTATRDLTVAGFKTLLLEARDRIGGRSWSSLIDGYPYEMGGTWVHWHQSHVWREITRYKMHNALSPSFNFSRGVNHFQLRTNPTTSTYMTHEAEDELLRSALHKFTNVDGTNGRTVLPFPHDMFYVPEFRKYDEMSYSERIDQIRDELSLNERSSLEAFILLCSGGTLENSSFGEFLHWWAMSGYTYQGCMDCLISYKFKDGQSAFARRFWEEAAGTGRLGYVFGCPVRSVVNERDAVRVTARDGREFAAKRLVCTIPLNVLSSVHFSPPLSPQRMAAANIGHVNQCVKVHAEVSCPDMRSWSGISYPFNKLAYAIGDGTTPAGNTHIVCLGGAHNHIQPEEDVEATKMAVENMSPGNMDIKRLVFHNWCKDEFAKGAWFFAPPQLLSKSLDELRCRHGNVLFANSDWALGWRGFIDGAIEEGTRAAVTVIEELRPAPAVRSHL

SEQ ID NO: 263 - DNA, 1485 bp, synthetic construct
  misc_feature 1..1485: note = Variant of monoamine oxidase
  source 1..1485: mol_type = other DNA
atgaccagccgcgacggctatcagtggaccccggaaacgggtctgacccagggcgtaccgtccctgggtgtcatttcgccgccgactaacatcgaagataccgataaggacgggccttgggatgtcattgtcattgggggcgggtattgtgggctgaccgcaacccgtgatttaaccgtcgcagggttcaagacgctgctgctggaggcccgtgatcgtattggtggccgctcctggagcagtaatattgacggttacccgtatgagatgggtggcacttgggttcattggcatcaatctcacgtgtggcgtgaaatcacgcgttataaaatgcacaacgcgctgtctccatcatttaacttttcacgtggcgtgaatcacttccaactgcgtaccaatccgaccaccagtacgtacatgacgcacgaagcggaggatgaactgctgcgtagcgcattgcataaattcaccaatgtcgacggcactaatggccgtacagtgttgccgttcccacatgatatgttttatgtgccggaatttcgcaagtatgacgaaatgtcatattccgaacgcattgaccagatccgcgacgaactgtctttgaacgaacgctctagtttagaggctttcattttattatgtagcggtggcaccctggaaaggtccagctttggtgaatttctgcattggtgggcaatgtcgggttacacgtatcagggctgtatggattgtttaatctcctataaatttaaggatggccagagtgcgttcgcgcgtcgcttctgggaagaagccgctggcactggccgtctgggctatgtctttggttgtccggtgcgttctgtggtgaacgaacgcgacgcagtacgtgttaccgcacgtgacggtcgcgaattcgcagcgaaacgtttggtttgcacgattccgctgaacgtattgagttctgttcattttagcccaccactgtccccgcaacgcatggccgctgcgaacattggccatgttaaccagtgcgtcaaagtgcatgcggaagtcagttgtccggatatgcgttcatggtcgggtatctcctatccgttcaacaaattagcctacgctatcggcgatggcacgaccccagcgggtaatacgcatattgtgtgccttgggggggcccataatcatatccagccggaagaggacgtggaagcaacgaagatggccgttgaaaacatgtcgcctgggaatatggatatcaaacgtctggtcttccacaactggtgcaaggatgaatttgccaaaggcgcgtggttcttcgcccctccacagctgctgtcaaagagcctggatgaactgcgctgccgtcacggtaatgtcctgtttgcaaactccgattgggccttaggttggcgtggttttatcgatggtgctatcgaggagggcacccgcgcagcggttactgtaattgaggaactgcgtcctgcgcctgcggtgcgttcccacctg

SEQ ID NO: 264 - protein, 495 aa, synthetic construct
  REGION 1..495: note = Variant of monoamine oxidase
MTSRDGYQWTPETGLTQGVPSLGVISPPTNIEDTDKDGPWDVIVIGGGYCGLTATRDLTVAGFKTLLLEARDRIGGRSWSSNIDGYPYEMGGTWVHWHQSHVWREITRYKMHNALSPSFNFSRGVNHFQLRTNPTTSTYMTHEAEDELLRSALHKFTNVDGTNGRTVLPFPHDMFYVPEFRKYDEMSYSERIDQIRDELSLNERSSLEAFILLCSGGTLERSSFGEFLHWWAMSGYTYQGCMDCLISYKFKDGQSAFARRFWEEAAGTGRLGYVFGCPVRSVVNERDAVRVTARDGREFAAKRLVCTIPLNVLSSVHFSPPLSPQRMAAANIGHVNQCVKVHAEVSCPDMRSWSGISYPFNKLAYAIGDGTTPAGNTHIVCLGGAHNHIQPEEDVEATKMAVENMSPGNMDIKRLVFHNWCKDEFAKGAWFFAPPQLLSKSLDELRCRHGNVLFANSDWALGWRGFIDGAIEEGTRAAVTVIEELRPAPAVRSHL

SEQ ID NO: 265 - DNA, 1485 bp, synthetic construct
  misc_feature 1..1485: note = Variant of monoamine oxidase
  source 1..1485: mol_type = other DNA
atgaccagccgcgacggctatcagtggaccccggaaacgggtctgacccagggcgtaccgtccctgggtgtcatttcgccgccgactaacatcgaagataccgataaggacgggccttgggatgtcattgtcattgggggcgggtattgtgggctgaccgcaacccgtgatttaaccgtcgcagggttcaagacgctgctgctggaggcccgtgatcgtattggtggccgctcctggagcagtaatattgacggttacccgtatgagatgggtggcacttgggttcattggcatcaatctcacgtgtggcgtgaaatcacgcgttataaaatgcacaacgcgctgtctccatcatttaacttttcacgtggcgtgaatcacttccaactgcgtaccaatccgaccaccagtacgtacatgacgcacgaagcggaggatgaactgctgcgtagcgcattgcatcagttcaccaatgtcgacggcactaatggccgtacagtgttgccgttcccacatgatatgttttatgtgccggaatttcgcaagtatgacgaaatgtcatattccgaacgcattgaccagatccgcgacgaactgtctttgaacgaacgctctagtttagaggctttcattttattatgtagcggtggcaccctggaaaactccagctttggtgaatttctgcattggtgggcaatgtcgggttacacgtatcagggctgtatggattgtttaatctcctataaatttaaggatggccagagtgcgttcgcgcgtcgcttctgggaagaagccgctggcactggccgtctgggctatgtctttggttgtccggtgcgttctgtggtgaacgaacgcgacgcagtacgtgttaccgcacgtgacggtcgcgaattcgcagcgaaacgtttggtttgcacgattccgctgaacgtattgagttctgttcattttagcccaccactgtccccgcaacgcatggccgctgcgaacattggccatgttaaccagtgcgtcaaagtgcatgcggaagtcagttgtccggatatgcgttcatggtcgggtatctcctatccgttcaacaaattagcctacgctatcggcgatggcacgaccccagcgggtaatacgcatattgtgtgccttgggggggcccataatcatatccagccggaagaggacgtggaagcaacgaagatggccgttgaaaacatgtcgcctgggaatatggatatcaaacgtctggtcttccacaactggtgcaaggatgaatttgccaaaggcgcgtggttcttcgcccctccacagctgctgtcaaagagcctggatgaactgcgctgccgtcacggtaatgtcctgtttgcaaactccgattgggccttaggttggcgtggttttatcgatggtgctatcgaggagggcacccgcgcagcggttactgtaattgaggaactgcgtcctgcgcctgcggtgcgttcccacctg

SEQ ID NO: 266 - protein, 495 aa, synthetic construct
  REGION 1..495: note = Variant of monoamine oxidase
MTSRDGYQWTPETGLTQGVPSLGVISPPTNIEDTDKDGPWDVIVIGGGYCGLTATRDLTVAGFKTLLLEARDRIGGRSWSSNIDGYPYEMGGTWVHWHQSHVWREITRYKMHNALSPSFNFSRGVNHFQLRTNPTTSTYMTHEAEDELLRSALHQFTNVDGTNGRTVLPFPHDMFYVPEFRKYDEMSYSERIDQIRDELSLNERSSLEAFILLCSGGTLENSSFGEFLHWWAMSGYTYQGCMDCLISYKFKDGQSAFARRFWEEAAGTGRLGYVFGCPVRSVVNERDAVRVTARDGREFAAKRLVCTIPLNVLSSVHFSPPLSPQRMAAANIGHVNQCVKVHAEVSCPDMRSWSGISYPFNKLAYAIGDGTTPAGNTHIVCLGGAHNHIQPEEDVEATKMAVENMSPGNMDIKRLVFHNWCKDEFAKGAWFFAPPQLLSKSLDELRCRHGNVLFANSDWALGWRGFIDGAIEEGTRAAVTVIEELRPAPAVRSHL

SEQ ID NO: 267 - DNA, 1485 bp, synthetic construct
  misc_feature 1..1485: note = Variant of monoamine oxidase
  source 1..1485: mol_type = other DNA
atgaccagccgcgacggctatcagtggaccccggaaacgggtctgacccagggcgtaccgtccctgggtgtcatttcgccgccgactaacatcgaagataccgataaggacgggccttgggatgtcattgtcattgggggcgggtattgtgggctgaccgcaacccgtgatttaaccgtcgcagggttcaagacgctgctgctggaggcccgtgatcgtattggtggccgctcctggagcagtaatattgacggttacccgtatgagatgggtggcacttgggttcattggcatcaatctcacgtgtggcgtgaaatcacgcgttataaaatgcacaacgcgctgtctccatcatttaacttttcacgtggcgtgaatcacttccaactgcgtaccaatccgaccaccagtacgtacatgacgcacgaagcggaggatgaactgctgcgtagcgcattgcataaattcaccaatgtcgacggcactaatggccgtacagtgttgccgttcccacatgatatgttttatgtgccggaatttcgcaagtatgacgaaatgtcatattccgaacgcatcgaccagatccgcgacgaactgtctttgaacgaacgctctagtttagaggctttcattttattatgtagcggtggcaccctggaaaactccagctttggtgaatttctgcattggtgggcaatgtcgggttacacgtatcagggctgtatggattgtttaatctcctataaatttaaggatggccagagtgcgttcgcgcgtcgcttctgggaagaagccgctggcactggccgtctgggctatgtctttggttgtccggtgcgttctgtggtgaacgaacgcgacgcagtacgtgttaccgcacgtgacggtcgcgaattcgcagcgaaacgtttggtttgcacgattccgctgaacgtattgagttctgttcattttagcccaccactgtccccgcaacgcatggccgctgcgaacattggccatgttaaccagtgcgtcaaagtgcatgcggaagtcagttgtccggatatgcgttcatggtcgggtatctcctatccgttcaacaaattagcctacgctatcggcgatggcacgaccccagcgggtaatacgcatattgtgtgccttgggggggcccataatcatatccagccgagtgaggacgtggaagcaacgaagatggccgttgaaaacatgtcgcctgggaatatggatatcaaacgtctggtcttccacaactggtgcaaggatgaatttgccaaaggcgcgtggttcttcgcccctccacagctgctgtcaaagagcctggatgaactgcgctgccgtcacggtaatgtcctgtttgcaaactccgattgggccttaggttggcgtggttttatcgatggtgctatcgaggagggcacccgcgcagcggttactgtaattgaggaactgcgtcctgcgcctgcggtgcgttcccacctg

SEQ ID NO: 268 - protein, 495 aa, synthetic construct
  REGION 1..495: note = Variant of monoamine oxidase
MTSRDGYQWTPETGLTQGVPSLGVISPPTNIEDTDKDGPWDVIVIGGGYCGLTATRDLTVAGFKTLLLEARDRIGGRSWSSNIDGYPYEMGGTWVHWHQSHVWREITRYKMHNALSPSFNFSRGVNHFQLRTNPTTSTYMTHEAEDELLRSALHKFTNVDGTNGRTVLPFPHDMFYVPEFRKYDEMSYSERIDQIRDELSLNERSSLEAFILLCSGGTLENSSFGEFLHWWAMSGYTYQGCMDCLISYKFKDGQSAFARRFWEEAAGTGRLGYVFGCPVRSVVNERDAVRVTARDGREFAAKRLVCTIPLNVLSSVHFSPPLSPQRMAAANIGHVNQCVKVHAEVSCPDMRSWSGISYPFNKLAYAIGDGTTPAGNTHIVCLGGAHNHIQPSEDVEATKMAVENMSPGNMDIKRLVFHNWCKDEFAKGAWFFAPPQLLSKSLDELRCRHGNVLFANSDWALGWRGFIDGAIEEGTRAAVTVIEELRPAPAVRSHL

SEQ ID NO: 269 - DNA, 1485 bp, synthetic construct
  misc_feature 1..1485: note = Variant of monoamine oxidase
  source 1..1485: mol_type = other DNA
atgaccagccgcgacggctatcagtggaccccggaaacgggtctgacccagggcgtaccgtccctgggtgtcatttcgccgccgactaacatcgaagataccgataaggacgggccttgggatgtcattgtcattgggggcgggtattgtgggctgaccgcaacccgtgatttaaccgtcgcagggttcaagacgctgctgctggaggcccgtgatcgtattggtggccgctcctggagcagtaatattgacggttacccgtatgagatgggtggcacttgggttcattggcatcaatctcacgtgtggcgtgaaatcacgcgttataaaatgcacaacgcgctgtctccatcatttaacttttcacgtggcgtgaatcacttccaactgcgtaccaatccgaccaccagtacgtacatgacgcacgaagcggaggatgaactgctgcgtagcgcattgcataaattcaccaatgtcgacggcactaatggccgtacagtgttgccgttcccacatgatatgttttatgtgccggaatttcgcaagtatgacgaaatgtcatattccgaacgcattgaccagatccgcgacgaactgtctttgaacgaacgctctagtttagaggctttcattttattatgtagcggtggcaccctggaaaactccagctttggtgaatttctgcattggtgggcaatgtcgggttacacgtatcagggctgtatggattgtttaatctcctataaatttaaggatggccagagtgcgttcgcgcgtcgcttctgggaagaagccgctggcactggccgtctgggctatgtctttggttgtccggtgcgttctgtggtgaacgaacgcgacgcagtacgtgttaccgcacgtgacggtcgcgaattcgcagcgaaacgtttggtttgcacgattccgctgaacgtattgagttctgttcattttagcccaccactgcgtccgcaacgcatggccgctgcgaacattggccatgttaaccagtgcgtcaaagtgcatgcggaagtcagttgtccggatatgcgttcatggtcgggtatctcctatccgttcaacaaattagcctacgctatcggcgatggcacgaccccagcgggtaatacgcatattgtgtgccttgggggggcccataatcatatccagccggaagaggacgtggaagcaacgaagatggccgttgaaaacatgtcgcctgggaatatggatatcaaacgtctggtcttccacaactggtgcaaggatgaatttgccaaaggcgcgtggttcttcgcccctccacagctgctgtcaaagagcctggatgaactgcgctgccgtcacggtaatgtcctgtttgcaaactccgattgggccttaggttggcgtggttttatcgatggtgctatcgaggagggcacccgcgcagcggttactgtaattgaggaactgcgtcctgcgcctgcggtgcgttcccacctg

SEQ ID NO: 270 - protein, 495 aa, synthetic construct
  REGION 1..495: note = Variant of monoamine oxidase
MTSRDGYQWTPETGLTQGVPSLGVISPPTNIEDTDKDGPWDVIVIGGGYCGLTATRDLTVAGFKTLLLEARDRIGGRSWSSNIDGYPYEMGGTWVHWHQSHVWREITRYKMHNALSPSFNFSRGVNHFQLRTNPTTSTYMTHEAEDELLRSALHKFTNVDGTNGRTVLPFPHDMFYVPEFRKYDEMSYSERIDQIRDELSLNERSSLEAFILLCSGGTLENSSFGEFLHWWAMSGYTYQGCMDCLISYKFKDGQSAFARRFWEEAAGTGRLGYVFGCPVRSVVNERDAVRVTARDGREFAAKRLVCTIPLNVLSSVHFSPPLRPQRMAAANIGHVNQCVKVHAEVSCPDMRSWSGISYPFNKLAYAIGDGTTPAGNTHIVCLGGAHNHIQPEEDVEATKMAVENMSPGNMDIKRLVFHNWCKDEFAKGAWFFAPPQLLSKSLDELRCRHGNVLFANSDWALGWRGFIDGAIEEGTRAAVTVIEELRPAPAVRSHL

SEQ ID NO: 271 - DNA, 1485 bp, synthetic construct
  misc_feature 1..1485: note = Variant of monoamine oxidase
  source 1..1485: mol_type = other DNA
atgaccagccgcgacggctatcagtggaccccggaaacgggtctgacccagggcgtaccgtccctgggtgtcatttcgccgccgactaacatcgaagataccgataaggacgggccttgggatgtcattgtcattgggggcgggtattgtgggctgaccgcaacccgtgatttaaccgtcgcagggttcaagacgctgctgctggaggcccgtgatcgtattggtggccgctcctggagcagtaatattgacggttacccgtatgagatgggtggcacttgggttcattggcatcaatctcacgtgtggcgtgaaatcacgcgttataaaatgcacaacgcgctgtctccatcatttaacttttcacgtggcgtgaatcacttccaactgcgtaccaatccgaccaccagtacgtacatgacgcacgaagcggaggatgaactgctgcgtagcgcattgcataaattcaccaatgtcgacggcactaatggccgtacagtgttgccgttcccacatgatatgttttatgtgccggaatttcgcaagtatgacttgatgtcatattccgaacgcattgaccagatccgcgacgaactgtctttgaacgaacgctctagtttagaggctttcattttattatgtagcggtggcaccctggaaaactccagctttggtgaatttctgcattggtgggcaatgtcgggttacacgtatcagggctgtatggattgtttaatctcctataaatttaaggatggccagagtgcgttcgcgcgtcgcttctgggaagaagccgctggcactggccgtctgggctatgtctttggttgtccggtgcgttctgtggtgaacgaacgcgacgcagtacgtgttaccgcacgtgacggtcgcgaattcgcagcgaaacgtttggtttgcacgattccgctgaacgtattgagttctgttcattttagcccaccactgtccccgcaacgcatggccgctgcgaacattggccatgttaaccagtgcgtcaaagtgcatgcggaagtcagttgtccggatatgcgttcatggtcgggtatctcctatccgttcaacaaattagcctacgctatcggcgatggcacgaccccagcgggtaatacgcatattgtgtgccttgggggggcccataatcatatccagccggaagaggacgtggaagcaacgaagatggccgttgaaaacatgtcgcctgggaatatggatatcaaacgtctggtcttccacaactggtgcaaggatgaatttgccaaaggcgcgtggttcttcgcccctccacagctgctgtcaaagagcctggatgaactgcgctgccgtcacggtaatgtcctgtttgcaaactccgattgggccttaggttggcgtggttttatcgatggtgctatcgaggagggcacccgcgcagcggttactgtaattgaggaactgcgtcctgcgcctgcggtgcgttcccacctg

SEQ ID NO: 272 - protein, 495 aa, synthetic construct
  REGION 1..495: note = Variant of monoamine oxidase
MTSRDGYQWTPETGLTQGVPSLGVISPPTNIEDTDKDGPWDVIVIGGGYCGLTATRDLTVAGFKTLLLEARDRIGGRSWSSNIDGYPYEMGGTWVHWHQSHVWREITRYKMHNALSPSFNFSRGVNHFQLRTNPTTSTYMTHEAEDELLRSALHKFTNVDGTNGRTVLPFPHDMFYVPEFRKYDLMSYSERIDQIRDELSLNERSSLEAFILLCSGGTLENSSFGEFLHWWAMSGYTYQGCMDCLISYKFKDGQSAFARRFWEEAAGTGRLGYVFGCPVRSVVNERDAVRVTARDGREFAAKRLVCTIPLNVLSSVHFSPPLSPQRMAAANIGHVNQCVKVHAEVSCPDMRSWSGISYPFNKLAYAIGDGTTPAGNTHIVCLGGAHNHIQPEEDVEATKMAVENMSPGNMDIKRLVFHNWCKDEFAKGAWFFAPPQLLSKSLDELRCRHGNVLFANSDWALGWRGFIDGAIEEGTRAAVTVIEELRPAPAVRSHL

SEQ ID NO: 273 - DNA, 1485 bp, synthetic construct
  misc_feature 1..1485: note = Variant of monoamine oxidase
  source 1..1485: mol_type = other DNA
atgaccagccgcgacggctatcagtggaccccggaaacgggtctgacccagggcgtaccgtccctgggtgtcatttcgccgccgactaacatcgaagataccgataaggacgggccttgggatgtcattgtcattgggggcgggtattgtgggctgaccgcaacccgtgatttaaccgtcgcagggttcaagacgctgctgctggaggcccgtgatcgtattggtggccgctcctggagcagtaatattgacggttacccgtatgagatgggtggcacttgggttcattggcatcaatctcacgtgtggcgtgaaatcacgcgttataaaatgcacaacgcgctgtctccatcatttaacttttcacgtggcgtgaatcacttccaactgcgtaccaatccgaccaccagtacgtacatgacgcacgaagcggaggatgaactgctgcgtagcgcattgcataaattcaccaatgtcgacggcactaatggccgtacagtgttgccgttcccacatgatatgttttatgtgccggaatttcgcaagtatgacgaaatgtcatattccgaacgcattgaccagatccgcgacgaactgtctttgaacgaacgctctagtttagaggctttcattttattatgtagcggtggcaccctggaaaactccagctttggtgaatttctgcattggtgggcaatgtcgggttacacgtatcagggctgtatggattgtttaatctcctataaatttaaggatggccagagtgcgttcgcgcgtcgcttctgggaagaagccgctggcactggccgtctgggctatgtctttggttgtccggtgcgttctgtggtgaacgaacgcgacgcagtacgtgttaccgcacgtgacggtcgcgaattcgcagcgaaacgtttggtttgcacgattccgctgaacgtattgagttctgttcattttagcccaccactgtccccgcaacgcatggccgctgcgaacattggccatgttaaccagtgcgtcaaagtgcatgcggaagtcagttgtccggatatgcgttcatggtcgggtatctcctatccgttcaacaaattagcctacgctatcggcgatggcacgaccccagcgggtaatacgcatattgtgtgccttgggggggcccataatcatatccagccggaaatggacgtggaagcaacgaagatggccgttgaaaacatgtcgcctgggaatatggatatcaaacgtctggtcttccacaactggtgcaaggatgaatttgccaaaggcgcgtggttcttcgcccctccacagctgctgtcaaagagcctggatgaactgcgctgccgtcacggtaatgtcctgtttgcaaactccgattgggccttaggttggcgtggttttatcgatggtgctatcgaggagggcacccgcgcagcggttactgtaattgaggaactgcgtcctgcgcctgcggtgcgttcccacctg

SEQ ID NO: 274 - protein, 495 aa, synthetic construct
  REGION 1..495: note = Variant of monoamine oxidase
MTSRDGYQWTPETGLTQGVPSLGVISPPTNIEDTDKDGPWDVIVIGGGYCGLTATRDLTVAGFKTLLLEARDRIGGRSWSSNIDGYPYEMGGTWVHWHQSHVWREITRYKMHNALSPSFNFSRGVNHFQLRTNPTTSTYMTHEAEDELLRSALHKFTNVDGTNGRTVLPFPHDMFYVPEFRKYDEMSYSERIDQIRDELSLNERSSLEAFILLCSGGTLENSSFGEFLHWWAMSGYTYQGCMDCLISYKFKDGQSAFARRFWEEAAGTGRLGYVFGCPVRSVVNERDAVRVTARDGREFAAKRLVCTIPLNVLSSVHFSPPLSPQRMAAANIGHVNQCVKVHAEVSCPDMRSWSGISYPFNKLAYAIGDGTTPAGNTHIVCLGGAHNHIQPEMDVEATKMAVENMSPGNMDIKRLVFHNWCKDEFAKGAWFFAPPQLLSKSLDELRCRHGNVLFANSDWALGWRGFIDGAIEEGTRAAVTVIEELRPAPAVRSHL

SEQ ID NO: 275 - DNA, 1485 bp, synthetic construct
  misc_feature 1..1485: note = Variant of monoamine oxidase
  source 1..1485: mol_type = other DNA
atgaccagccgcgacggctatcagtggaccccggaaacgggtctgacccagggcgtaccgtccctgggtgtcatttcgccgccgactaacatcgaagataccgataaggacgggccttgggatgtcattgtcattgggggggggtattgtgggctgaccgcaacccgtgatttaaccgtcgcagggttcaagacgctgctgctggaggcccgtgatcgtattggtggccgctcctggagcagtaatattgacggttacccgtatgagatgggtggcacttgggttcattggcatcaatctcacgtgtggcgtgaaatcacgcgttataaaatgcacaacgcgctgtctccatcatttaacttttcacgtggcgtgaatcacttccaactgcgtaccaatccgaccaccagtacgtacatgacgcacgaagcggaggatgaactgctgcgtagcgcattgcataaattcaccaatgtcgacggcactaatggccgtacagtgttgccgttcccacatgatatgttttatgtgccggaatttcgcaagtatgacgaaatgtcatattccgaacgcattgaccagatccgcgacgaactgtctttgaacgaacgctctagtttagaggctttcattttattatgtagcggtggcaccctggaaaactccagctttggtgaatttctgcattggtgggcaatgtcgggttacacgtatcagggctgtatggattgtttaatctcctataaatttaaggatggccagagtgcgttcgcgcgtcgcttctgggaagaagccctgggcactggccgtctgggctatgtctttggttgtccggtgcgttctgtggtgaacgaacgcgacgcagtacgtgttaccgcacgtgacggtcgcgaattcgcagcgaaacgtttggtttgcacgattccgctgaacgtattgagttctgttcattttagcccaccactgtccccgcaacgcatggccgctgcgaacattggccatgttaaccagtgcgtcaaagtgcatgcggaagtcagttgtccggatatgcgttcatggtcgggtatctcctatccgttcaacaaattagcctacgctatcggcgatggcacgaccccagcgggtaatacgcatattgtgtgccttgggggggcccataatcatatccagccggaagaggacgtggaagcaacgaagatggccgttgaaaacatgtcgcctgggaatatggatatcaaacgtctggtcttccacaactggtgcaaggatgaatttgccaaaggcgcgtggttcttcgcccctccacagctgctgtcaaagagcctggatgaactgcgcgcacgtcacggtaatgtcctgtttgcaaactccgattgggccttaggttggcgtggttttatcgatggtgctatcgaggagggcacccgcgcagcggttactgtaattgaggaactgcgtcctgcgcctgcggtgcgttcccacctg

SEQ ID NO: 276 - protein, 495 aa, synthetic construct
  REGION 1..495: note = Variant of monoamine oxidase
MTSRDGYQWTPETGLTQGVPSLGVISPPTNIEDTDKDGPWDVIVIGGGYCGLTATRDLTVAGFKTLLLEARDRIGGRSWSSNIDGYPYEMGGTWVHWHQSHVWREITRYKMHNALSPSFNFSRGVNHFQLRTNPTTSTYMTHEAEDELLRSALHKFTNVDGTNGRTVLPFPHDMFYVPEFRKYDEMSYSERIDQIRDELSLNERSSLEAFILLCSGGTLENSSFGEFLHWWAMSGYTYQGCMDCLISYKFKDGQSAFARRFWEEALGTGRLGYVFGCPVRSVVNERDAVRVTARDGREFAAKRLVCTIPLNVLSSVHFSPPLSPQRMAAANIGHVNQCVKVHAEVSCPDMRSWSGISYPFNKLAYAIGDGTTPAGNTHIVCLGGAHNHIQPEEDVEATKMAVENMSPGNMDIKRLVFHNWCKDEFAKGAWFFAPPQLLSKSLDELRARHGNVLFANSDWALGWRGFIDGAIEEGTRAAVTVIEELRPAPAVRSHL

SEQ ID NO: 277 - DNA, 1485 bp, synthetic construct
  misc_feature 1..1485: note = Variant of monoamine oxidase
  source 1..1485: mol_type = other DNA
atgaccagccgcgacggctatcagtggaccccggaaacgggtctgacccagggcgtaccgtccctgggtgtcatttcgccgccgactaacatcgaagataccgataaggacgggccttgggatgtcattgtcattgggggcgggtattgtgggctgaccgcaacccgtgatttaaccgtcgcagggttcaagacgctgctgctggaggcccgtgatcgtattggtggccgctcctggagcagtaatattgacggttacccgtatgagatgggtggcacttgggttcattggcatcaatctcacgtgtggcgtgaaatcacgcgttataaaatgcactgggcgctgtctccatcatttaacttttcacgtggcgtgaatcacttccaactgcgtaccaatccgaccaccagtacgtacatgacgcacgaagcggaggatgaactgctgcgtagcgcattgcataaattcaccaatgtcgacggcactaatggccgtacagtgttgccgttcccacatgatatgttttatgtgccggaatttcgcaagtatgacgaaatgtcatattccgaacgcattgaccagatccgcgacgaactgtctttgaacgaacgctctagtttagaggctttcattttattatgtagcggtggcaccctggaaaactccagctttggtgaatttctgcattggtgggcaatgtcgggttacacgtatcagggctgtatggattgtttaatctcctataaatttaaggatggccagagtgcgttcgcgcgtcgcttctgggaagaagccgctggcactggccgtctgggctatgtctttggttgtccggtgcgttctgtggtgaacgaacgcgacgcagtacgtgttaccgcacgtgacggtcgcgaattcgcagcgaaacgtttggtttgcacgattccgctgaacgtattgagttctgttcattttagcccaccactgtccccgcaacgcatggccgctgcgaacattggccatgttaaccagtgcgtcaaagtgcatgcggaagtcagttgtccggatatgcgttcatggtcgggtatctcctatccgttcaacaaattagcctacgctatcggcgatggcacgaccccagcgggtaatacgcatattgtgtgccttgggggggcccataatcatatccagccggaagaggacgtggaagcaacgaagatggccgttgaaaacatgtcgcctgggaatatggatatcaaacgtctggtcttccacaactggtgcaaggatgaatttgccaaaggcgcgtggttcttcgcccctccacagctgctgtcaaagagcctggatgaactgcgctgccgtcacggtaatgtcctgtttgcaaactccgattgggccttaggttggcgtggttttatcgatggtgctatcgaggagggcacccgcgcagcggttactgtaattgaggaactgcgtcctgcgcctgcggtgcgttcccacctg

SEQ ID NO: 278 - protein, 495 aa, synthetic construct
  REGION 1..495: note = Variant of monoamine oxidase
MTSRDGYQWTPETGLTQGVPSLGVISPPTNIEDTDKDGPWDVIVIGGGYCGLTATRDLTVAGFKTLLLEARDRIGGRSWSSNIDGYPYEMGGTWVHWHQSHVWREITRYKMHWALSPSFNFSRGVNHFQLRTNPTTSTYMTHEAEDELLRSALHKFTNVDGTNGRTVLPFPHDMFYVPEFRKYDEMSYSERIDQIRDELSLNERSSLEAFILLCSGGTLENSSFGEFLHWWAMSGYTYQGCMDCLISYKFKDGQSAFARRFWEEAAGTGRLGYVFGCPVRSVVNERDAVRVTARDGREFAAKRLVCTIPLNVLSSVHFSPPLSPQRMAAANIGHVNQCVKVHAEVSCPDMRSWSGISYPFNKLAYAIGDGTTPAGNTHIVCLGGAHNHIQPEEDVEATKMAVENMSPGNMDIKRLVFHNWCKDEFAKGAWFFAPPQLLSKSLDELRCRHGNVLFANSDWALGWRGFIDGAIEEGTRAAVTVIEELRPAPAVRSHL

SEQ ID NO: 279 - DNA, 1485 bp, synthetic construct
  misc_feature 1..1485: note = Variant of monoamine oxidase
  source 1..1485: mol_type = other DNA
atgaccagccgcgacggctatcagtggaccccggaaacgggtctgacccagggcgtaccgtccctgggtgtcatttcgccgccgactaacatcgaagataccgataaggacgggccttgggatgtcattgtcattgggggcgggtattgtgggctgaccgcaacccgtgatttaaccgtcgcagggttcaagacgctgctgctggaggcccgtgatcgtattggtggccgctcctggagcagtaatattgacggttacccgtatgagatgggtggcacttgggttcattggcatcaatctcacgtgtggcgtgaaatcacgcgttataaaatgcacaacgcgctgtctgcttcatttaacttttcacgtggcgtgaatcacttccaactgcgtaccaatccgaccaccagtacgtacatgacgcacgaagcggaggatgaactgctgcgtagcgcattgcataaattcaccaatgtcgacggcactaatggccgtacagtgttgccgttcccacatgatatgttttatgtgccggaatttcgcaagtatgacgaaatgtcatattccgaacgcattgaccagatccgcgacgaactgtctttgaacgaacgctctagtttagaggctttcattttattatgtagcggtggcaccctggaaaactccagctttggtgaatttctgcattggtgggcaatgtcgggttacacgtatcagggctgtatggattgtttaatctcctataaatttaaggatggccagagtgcgttcgcgcgtcgcttctgggaagaagccgctggcactggccgtctgggctatgtctttggttgtccggtgcgttctgtggtgaacgaacgcgacgcagtacgtgttaccgcacgtgacggtcgcgaattcgcagcgaaacgtttggtttgcacgattccgctgaacgtattgagttctgttcattttagcccaccactgtccccgcaacgcatggccgctgcgaacattggccatgttaaccagtgcgtcaaagtgcatgcggaagtcagttgtccggatatgcgttcatggtcgggtatctcctatccgttcaacaaattagcctacgctatcggcgatggcacgaccccagcgggtaatacgcatattgtgtgccttgggggggcccataatcatatccagccggaagaggacgtggaagcaacgaagatggccgttgaaaacatgtcgcctgggaatatggatatcaaacgtctggtcttccacaactggtgcaaggatgaatttgccaaaggcgcgtggttcttcgcccctccacagctgctgtcaaagagcctggatgaactgcgctgccgtcacggtaatgtcctgtttgcaaactccgattgggccttaggttggcgtggttttatcgatggtgctatcgaggagggcacccgcgcagcggttactgtaattgaggaactgcgtcctgcgcctgcggtgcgttcccacctg

SEQ ID NO: 280 - protein, 495 aa, synthetic construct
  REGION 1..495: note = Variant of monoamine oxidase
MTSRDGYQWTPETGLTQGVPSLGVISPPTNIEDTDKDGPWDVIVIGGGYCGLTATRDLTVAGFKTLLLEARDRIGGRSWSSNIDGYPYEMGGTWVHWHQSHVWREITRYKMHNALSASFNFSRGVNHFQLRTNPTTSTYMTHEAEDELLRSALHKFTNVDGTNGRTVLPFPHDMFYVPEFRKYDEMSYSERIDQIRDELSLNERSSLEAFILLCSGGTLENSSFGEFLHWWAMSGYTYQGCMDCLISYKFKDGQSAFARRFWEEAAGTGRLGYVFGCPVRSVVNERDAVRVTARDGREFAAKRLVCTIPLNVLSSVHFSPPLSPQRMAAANIGHVNQCVKVHAEVSCPDMRSWSGISYPFNKLAYAIGDGTTPAGNTHIVCLGGAHNHIQPEEDVEATKMAVENMSPGNMDIKRLVFHNWCKDEFAKGAWFFAPPQLLSKSLDELRCRHGNVLFANSDWALGWRGFIDGAIEEGTRAAVTVIEELRPAPAVRSHL

SEQ ID NO: 281 - DNA, 1485 bp, synthetic construct
  misc_feature 1..1485: note = Variant of monoamine oxidase
  source 1..1485: mol_type = other DNA
atgaccagccgcgacggctatcagtggaccccggaaacgggtctgacccagggcgtaccgtccctgggtgtcatttcgccgccgactaacatcgaagataccgataaggacgggccttgggatgtcattgtcattgggggcgggtattgtgggctgaccgcaacccgtgatttaaccgtcgcagggttcaagacgctgctgctggaggcccgtgatcgtattggtggccgctcctggagcagtaatattgacggttacccgtatgagatgggtggcacttgggttcattggcatcaatctcacgtgtggcgtgaaatcacgcgttataaaatgcacaacgcgctgtctccatcatttaacttttcacgtggcgtgaatcacttccaactgcgtaccaatccgaccaccagtacgtacatgacgcacgaagcggaggatgaactgctgcgtagcgcattgcataaattcaccaatgtcgacggcactaatggccgtacagtgttgccgttcccacatgatatgttttatgtgccggaatttcgcaagtatgacgaaatgtcatattccgaacgcattgaccagatccgcgacgaactgtctttgaacgaacgctctagtttagaggctttcattttattatgtagcggtggcaccctggaaaactccagctttggtgaatttctgcattggtgggcaatgtcgggttacacgtatcagggctgtatggattgtttaatctcctataaatttaaggatggccagagtgcgttcgcgcgtcgcttctgggaagaagccgctggcactggccgtctgggctatgtctttggttgtccggtgcgttctgtggtgaacgaacgcgacgcagtacgtgttaccgcacgtgacggtcgcgaattcgcagcgaaacgtttggtttgcacgattccgctgaacgtattgagttctgttcattttagcccaccactgtccccgcaacgcatggccgctgcgaacattggccatgttaaccagtgcgtcaaagtgcatgcggaagtcagttgtccggatatgcgttcatggtcgggtatctcctatccgttcaacaaattagcctacgctatcggcgatggcacgaccccagcgggtaatacgcatattgtgtgccttgggggggcccataatcatatccagccggaagaggacgtggaagcaacgaagatggccgttgaaaacatgtcgcctgggaatatggttatcaaacgtctggtcttccacaactggtgcaaggatgaatttgccaaaggcgcgtggttcttcgcccctccacagctgctgtcaaagagcctggatgaaaggcgctgccgtcacggtaatgtcctgtttgcaaactccgattgggccttaggttggcgtggttttatcgatggtgctatcgaggagggcacccgcgcagcggttactgtaattgaggaactgcgtcctgcgcctgcggtgcgttcccacctg

SEQ ID NO: 282 - protein, 495 aa, synthetic construct
  REGION 1..495: note = Variant of monoamine oxidase
MTSRDGYQWTPETGLTQGVPSLGVISPPTNIEDTDKDGPWDVIVIGGGYCGLTATRDLTVAGFKTLLLEARDRIGGRSWSSNIDGYPYEMGGTWVHWHQSHVWREITRYKMHNALSPSFNFSRGVNHFQLRTNPTTSTYMTHEAEDELLRSALHKFTNVDGTNGRTVLPFPHDMFYVPEFRKYDEMSYSERIDQIRDELSLNERSSLEAFILLCSGGTLENSSFGEFLHWWAMSGYTYQGCMDCLISYKFKDGQSAFARRFWEEAAGTGRLGYVFGCPVRSVVNERDAVRVTARDGREFAAKRLVCTIPLNVLSSVHFSPPLSPQRMAAANIGHVNQCVKVHAEVSCPDMRSWSGISYPFNKLAYAIGDGTTPAGNTHIVCLGGAHNHIQPEEDVEATKMAVENMSPGNMVIKRLVFHNWCKDEFAKGAWFFAPPQLLSKSLDERRCRHGNVLFANSDWALGWRGFIDGAIEEGTRAAVTVIEELRPAPAVRSHL

SEQ ID NO: 283 - DNA, 1485 bp, synthetic construct
  misc_feature 1..1485: note = Variant of monoamine oxidase
  source 1..1485: mol_type = other DNA
atgaccagccgcgacggctatcagtggaccccggaagggggtctgacccagggcgtaccgtccctgggtgtcatttcgccgccgactaacatcgaagataccgataaggacgggccttgggatgtcattgtcattgggggcgggtattgtgggctgaccgcaacccgtgatttaaccgtcgcagggttcaagacgctgctgctggaggcccgtgatcgtattggtggccgctcctggagcagtaatattgacggttacccgtatgagatgggtggcacttgggttcattggcatcaatctcacgtgtggcgtgaaatcacgcgttataaaatgcacaacgcgctgtctccatcatttaacttttcacgtggcgtgaatcacttccaactgcgtaccaatccgaccaccagtacgtacatgacgcacgaagcggaggatgaactgctgcgtagcgcattgcataaattcaccaatgtcgacggcactaatggccgtacagtgttgccgttcccacatgatatgttttatgtgccggaatttcgcaagtatgacgaaatgtcatattccgaacgcattgaccagatccgcgacgaactgtctttgaacgaacgctctagtttagaggctttcattttattatgtagcggtggcaccctggaaaactccagctttggtgaatttctgcattggtgggcaatgtcgggttacacgtatcagggctgtatggattgtttaatctcctataaatttaaggatggccagagtgcgttcgcgcgtcgcttctgggaagaagccgctggcactggccgtctgggctatgtctttggttgtccggtgcgttctgtggtgaacgaacgcgacgcagtacgtgttaccgcacgtgacggtcgcgaattcgcagcgaaacgtttggtttgcacgattccgctgaacgtattgagttctgttcattttagcccaccactgtccccgcaacgcatggccgctgcgaacattggccatgttaaccagtgcgtcaaagtgcatgcggaagtcagttgtccggatatgcgttcatggtcgggtatctcctatccgttcaacaaattagcctacgctatcggcgatggcacgaccccagcgggtaatacgcatattgtgtgccttgggggggcccataatcatatccagccggaagaggacgtggaagcaacgaagatggccgttgaaaacatgtcgcctgggaatatggatatcaaacgtctggtcttccacaactggtgcaaggatgaatttgccaaaggcgcgtggttcttcgcccctccacagctgctgtcaaagagcctggatgaactgcgctgccgtcacggtaatgtcctgtttgcaaactccgattgggccttaggttggcgtggttttatcgatggtgctatcgaggagggcacccgcgcagcggttactgtaattgaggaactgcgtcctgcgcctgcggtgcgttcccacctg

SEQ ID NO: 284 - protein, 495 aa, synthetic construct
  REGION 1..495: note = Variant of monoamine oxidase
MTSRDGYQWTPEGGLTQGVPSLGVISPPTNIEDTDKDGPWDVIVIGGGYCGLTATRDLTVAGFKTLLLEARDRIGGRSWSSNIDGYPYEMGGTWVHWHQSHVWREITRYKMHNALSPSFNFSRGVNHFQLRTNPTTSTYMTHEAEDELLRSALHKFTNVDGTNGRTVLPFPHDMFYVPEFRKYDEMSYSERIDQIRDELSLNERSSLEAFILLCSGGTLENSSFGEFLHWWAMSGYTYQGCMDCLISYKFKDGQSAFARRFWEEAAGTGRLGYVFGCPVRSVVNERDAVRVTARDGREFAAKRLVCTIPLNVLSSVHFSPPLSPQRMAAANIGHVNQCVKVHAEVSCPDMRSWSGISYPFNKLAYAIGDGTTPAGNTHIVCLGGAHNHIQPEEDVEATKMAVENMSPGNMDIKRLVFHNWCKDEFAKGAWFFAPPQLLSKSLDELRCRHGNVLFANSDWALGWRGFIDGAIEEGTRAAVTVIEELRPAPAVRSHL

SEQ ID NO: 285 - DNA, 1485 bp, synthetic construct
  misc_feature 1..1485: note = Variant of monoamine oxidase
  source 1..1485: mol_type = other DNA
atgaccagccgcgacggctatcagtggaccccggaaacgggtctgacccagggcgtaccgtccctgggtgtcatttcgccgccgactaacatcgaagataccgataaggacgggccttgggatgtcattgtcattgggggcgggtattgtgggctgaccgcaacccgtgatttaaccgtcgcagggttcaagacgctgctgctggaggcccgtgatcgtattggtggccgctcctggagcagtaatattgacggttacccgtatgagatgggtggcacttgggttcattggcatcaatctcacgtgtggcgtgaaatcacgcgttataaaatgcacaacgcgctgtctccatcatttaacttttcacgtggcgtgaatcacttccaactgcgtaccaatccgaccaccagtacgtacatgacgcacgaagcggaggatgaactgctgcgtagcgcattgcataaattcaccaatgtcgacggcactaatggccgtacagtgttgccgttcccacatgatatgttttatgtgccggaatttcgcaagtatgacgaaatgtcatattccgaacgcattgaccagatccgcgacgaagtgtctttgaacgaacgctctagtttagaggctttcattttattatgtagcggtggcaccctggaaaactccagctttggtgaatttctgcattggtgggcaatgtcgggttacacgtatcagggctgtatggattgtttaatctcctataaatttaaggatggccagagtgcgttcgcgcgtcgcttctgggaagaagccgctggcactggccgtctgggctatgtctttggttgtccggtgcgttctgtggtgaacgaacgcgacgcagtacgtgttaccgcacgtgacggtcgcgaattcgcagcgaaacgtttggtttgcacgattccgctgaacgtattgagttctgttcattttagcccaccactgtccccgcaacgcatggccgctgcgaacattggccatgttaaccagtgcgtcaaagtgcatgcggaagtcagttgtccggatatgcgttcatggtcgggtatctcctatccgttcaacaaattagcctacgctatcggcgatggcacgaccccagcgggtaatacgcatattgtgtgccttgggggggcccataatcatatccagccggaagaggacgtggaagcaacgaagatggccgttgaaaacatgtcgcctgggaatatggatatcaaacgtctggtcttccacaactggtgcaaggatgaatttgccaaaggcgcgtggttcttcgcccctccacagctgctgtcaaagagcctggatgaactgcgctgccgtcacggtaatgtcctgtttgcaaactccgattgggccttaggttggcgtggttttatcgatggtgctatcgaggagggcacccgcgcagcggttactgtaattgaggaactgcgtcctgcgcctgcggtgcgttcccacctg

SEQ ID NO: 286 - protein, 495 aa, synthetic construct
  REGION 1..495: note = Variant of monoamine oxidase
MTSRDGYQWTPETGLTQGVPSLGVISPPTNIEDTDKDGPWDVIVIGGGYCGLTATRDLTVAGFKTLLLEARDRIGGRSWSSNIDGYPYEMGGTWVHWHQSHVWREITRYKMHNALSPSFNFSRGVNHFQLRTNPTTSTYMTHEAEDELLRSALHKFTNVDGTNGRTVLPFPHDMFYVPEFRKYDEMSYSERIDQIRDEVSLNERSSLEAFILLCSGGTLENSSFGEFLHWWAMSGYTYQGCMDCLISYKFKDGQSAFARRFWEEAAGTGRLGYVFGCPVRSVVNERDAVRVTARDGREFAAKRLVCTIPLNVLSSVHFSPPLSPQRMAAANIGHVNQCVKVHAEVSCPDMRSWSGISYPFNKLAYAIGDGTTPAGNTHIVCLGGAHNHIQPEEDVEATKMAVENMSPGNMDIKRLVFHNWCKDEFAKGAWFFAPPQLLSKSLDELRCRHGNVLFANSDWALGWRGFIDGAIEEGTRAAVTVIEELRPAPAVRSHL

SEQ ID NO: 287 - DNA, 1485 bp, synthetic construct
  misc_feature 1..1485: note = Variant of monoamine oxidase
  source 1..1485: mol_type = other DNA
atgaccagccgcgacggctatcagtggaccccggaaacgggtctgacccagggcgtaccgtccctgggtgtcatttcgccgccgactaacatcgaagataccgataaggacgggccttgggatgtcattgtcattgggggcgggtattgtgggctgaccgcaacccgtgatttaaccgtcgcagggttcaagacgctgctgctggaggcccgtgatcgtattggtggccgctcctggagcagtaatattgacggttacccgtatgagatgggtggcacttgggttcattggcatcaatctcacgtgtggcgtgaaatcacgcgttataaaatgcacaacgcgctgtctccatcatttaacttttcacgtggcgtgaatcacttccaactgcgtaccaatccgaccaccagtacgtacatgacgcacgaagcggaggatgaactgctgcgtagcgcattgcataaattcaccaatgtcgacggcactaatggccgtacagtgttgccgttcccacatgatatgttttatgtgccggaatttcgcaagtatgacgaaatgtcatattccgaacgcattgaccagatccgcgacgaactgtctttgaacgaacgctctagtttagaggctttcattttattatgtagcggtggcaccctggaaaactccagctttggtgaatttctgcattggtgggcaatgtcgggttacacgtatcagggctgtatggattgtttaatctcctataaatttaaggatggccagagtgcgttcgcgcgtcgcttctgggaagaagccgctggcactggccgtctgggctatgtctttggttgtccggtgcgttctgtggtgaacgaacgcgacgcagtacgtgttaccgcacgtgacggtcgctgtttcgcagcgaaacgtttggtttgcacgattccgctgaacgtattgagttctgttcattttagcccaccactgtccccgcaacgcatggccgctgcgaacattggccatgttaaccagtgcgtcaaagtgcatgcggaagtcagttgtccggatatgcgttcatggtcgggtatctcctatccgttcaacaaattagcctacgctatcggcgatggcacgaccccagcgggtaatacgcatattgtgtgccttgggggggcccataatcatatccagccggaagaggacgtggaagcaacgaagatggccgttgaaaacatgtcgcctgggaatatggatatcaaacgtctggtcttccacaactggtgcaaggatgaatttgccaaaggcgcgtggttcttcgcccctccacagctgctgtcaaagagcctggatgaactgcgctgccgtcacggtaatgtcctgtttgcaaactccgattgggccttaggttggcgtggttttatcgatggtgctatcgaggagggcacccgcgcagcggttactgtaattgaggaactgcgtcctgcgcctgcggtgcgttcccacctg

SEQ ID NO: 288 - protein, 495 aa, synthetic construct
  REGION 1..495: note = Variant of monoamine oxidase
MTSRDGYQWTPETGLTQGVPSLGVISPPTNIEDTDKDGPWDVIVIGGGYCGLTATRDLTVAGFKTLLLEARDRIGGRSWSSNIDGYPYEMGGTWVHWHQSHVWREITRYKMHNALSPSFNFSRGVNHFQLRTNPTTSTYMTHEAEDELLRSALHKFTNVDGTNGRTVLPFPHDMFYVPEFRKYDEMSYSERIDQIRDELSLNERSSLEAFILLCSGGTLENSSFGEFLHWWAMSGYTYQGCMDCLISYKFKDGQSAFARRFWEEAAGTGRLGYVFGCPVRSVVNERDAVRVTARDGRCFAAKRLVCTIPLNVLSSVHFSPPLSPQRMAAANIGHVNQCVKVHAEVSCPDMRSWSGISYPFNKLAYAIGDGTTPAGNTHIVCLGGAHNHIQPEEDVEATKMAVENMSPGNMDIKRLVFHNWCKDEFAKGAWFFAPPQLLSKSLDELRCRHGNVLFANSDWALGWRGFIDGAIEEGTRAAVTVIEELRPAPAVRSHL

SEQ ID NO: 289 - DNA, 1485 bp, synthetic construct
  misc_feature 1..1485: note = Variant of monoamine oxidase
  source 1..1485: mol_type = other DNA
atgaccagccgcgacggctatcagtggaccccggaaacgggtctgacccagggcgtaccgtccctgggtgtcatttcgccgccgactaacatcgaagataccgataaggacgggccttgggatgtcattgtcattgggggcgggtattgtgggctgaccgcaacccgtgatttaaccgtcgcagggttcaagacgctgctgctggaggcccgtgatcgtattggtggccgctcctggagcagtaatattgacggttacccgtatgagatgggtggcacttgggttcattggcatcaatctcacgtgtggcgtgaaatcacgcgttataaaatgcacaacgcgctgtctccatcatttaacttttcacgtggcgtgaatcacttccaactgcgtaccaatccgaccaccagtacgtacatgacgcacgaagcggaggatgaactgctgcgtagcgcattgcataaattcaccaatgtcgacggcactaatggccgtacagtgttgccgttcccacatgatatgttttatgtgccggaatttcgcaagtatgacgaaatgtcatattccgaacgcattgaccagatccgcgacgaactgtctttgaacgaacgctctagtttagaggctttcattttattatgtagcggtggcaccctggaaaactccagctttggtgaatttctgcattggtgggcaatgtcgggttacacgtatcagggctgtatggattgtttaatctcctataaatttaaggatggccagagtgcgttcgcgcgtcgcttctgggaagaagccgctggcactggccgtctgggctatgtctttggttgtccggtgcgttctgtggtgaacgaacgcgacgcagtacgtgttaccgcacgtgacggtcgcgaattcgcagcgaaacgtttggtttgcacgattccgctgaacgtattgagttctgttcattttagcccaccactgtccccgcaacgcatggccgctgcgaacattggccatgttaaccagtgcgtcaaagtgcatgcggaagtcagttgtccggatatgcgttcatggtcgggtatctcctatccgttcttgaaattagcctacgctatcggcgatggcacgaccccagcgggtaatacgcatattgtgtgccttgggggggcccataatcatatccagccggaagaggacgtggaagcaacgaagatggccgttgaaaacatgtcgcctgggaatatggatatcaaacgtctggtcttccacaactggtgcaaggatgaatttgccaaaggcgcgtggttcttcgcccctccacagctgctgtcaaagagcctggatgaactgcgctgccgtcacggtaatgtcctgtttgcaaactccgattgggccttaggttggcgtggttttatcgatggtgctatcgaggagggcacccgcgcagcggttactgtaattgaggaactgcgtcctgcgcctgcggtgcgttcccacctg

SEQ ID NO: 290 - protein, 495 aa, synthetic construct
  REGION 1..495: note = Variant of monoamine oxidase
MTSRDGYQWTPETGLTQGVPSLGVISPPTNIEDTDKDGPWDVIVIGGGYCGLTATRDLTVAGFKTLLLEARDRIGGRSWSSNIDGYPYEMGGTWVHWHQSHVWREITRYKMHNALSPSFNFSRGVNHFQLRTNPTTSTYMTHEAEDELLRSALHKFTNVDGTNGRTVLPFPHDMFYVPEFRKYDEMSYSERIDQIRDELSLNERSSLEAFILLCSGGTLENSSFGEFLHWWAMSGYTYQGCMDCLISYKFKDGQSAFARRFWEEAAGTGRLGYVFGCPVRSVVNERDAVRVTARDGREFAAKRLVCTIPLNVLSSVHFSPPLSPQRMAAANIGHVNQCVKVHAEVSCPDMRSWSGISYPFLKLAYAIGDGTTPAGNTHIVCLGGAHNHIQPEEDVEATKMAVENMSPGNMDIKRLVFHNWCKDEFAKGAWFFAPPQLLSKSLDELRCRHGNVLFANSDWALGWRGFIDGAIEEGTRAAVTVIEELRPAPAVRSHL

SEQ ID NO: 291 - DNA, 1485 bp, synthetic construct
  misc_feature 1..1485: note = Variant of monoamine oxidase
  source 1..1485: mol_type = other DNA
atgaccagccgcgacggctatcagtggaccccggaaacgggtctgacccagggcgtaccgtccctgggtgtcatttcgccgccgactaacatcgaagataccgataaggacgggccttgggatgtcattgtcattgggggcgggtattgtgggctgaccgcaacccgtgatttaaccgtcgcagggttcaagacgctgctgctggaggcccgtgatcgtattggtggccgctcctggagcagtaatattgacggttacccgtatgagatgggtggcacttgggttcattggcatcaatctcacgtgtggcgtgaaatcacgcgttataaaatgcacaacgcgctgtctccatcatttaacttttcacgtggcgtgaatcacttccaactgcgtaccaatccgaccaccagtacgtacatgacgcacgaagcggaggatgaactgctgcgtagcgcattgcataaattcaccaatgtcgacggcactaatggccgtggggtgttgccgttcccacatgatatgttttatgtgccggaatttcgcaagtatgacgaaatgtcatattccgaacgcattgaccagatccgcgacgaactgtctttgaacgaacgctctagtttagaggctttcattttattatgtagcggtggcaccctggaaaactccagctttggtgaatttctgcattggtgggcaatgtcgggttacacgtatcagggctgtatggattgtttaatctcctataaatttaaggatggccagagtgcgttcgcgcgtcgcttctgggaagaagccgctggcactggccgtctgggctatgtctttggttgtccggtgcgttctgtggtgaacgaacgcgacgcagtacgtgttaccgcacgtgacggtcgcgaattcgcagcgaaacgtttggtttgcacgattccgctgaacgtattgagttctgttcattttagcccaccactgtccccgcaacgcatggccgctgcgaacattggccatgttaaccagtgcgtcaaagtgcatgcggaagtcagttgtccggatatgcgttcatggtcgggtatctcctatccgttcaacaaattagcctacgctatcggcgatggcacgaccccagcgggtaatacgcatattgtgtgccttgggggggcccataatcatatccagccggaagaggacgtggaagcaacgaagatggccgttgaaaacatgtcgcctgggaatatggatatcaaacgtctggtcttccacaactggtgcaaggatgaatttgccaaaggcgcgtggttcttcgcccctccacagctgctgtcaaagagcctggatgaactgcgctgccgtcacggtaatgtcctgtttgcaaactccgattgggccttaggttggcgtggttttatcgatggtgctatcgaggagggcacccgcgcagcggttactgtaattgaggaactgcgtcctgcgcctgcggtgcgttcccacctg

SEQ ID NO: 292 - protein, 495 aa, synthetic construct
  REGION 1..495: note = Variant of monoamine oxidase
MTSRDGYQWTPETGLTQGVPSLGVISPPTNIEDTDKDGPWDVIVIGGGYCGLTATRDLTVAGFKTLLLEARDRIGGRSWSSNIDGYPYEMGGTWVHWHQSHVWREITRYKMHNALSPSFNFSRGVNHFQLRTNPTTSTYMTHEAEDELLRSALHKFTNVDGTNGRGVLPFPHDMFYVPEFRKYDEMSYSERIDQIRDELSLNERSSLEAFILLCSGGTLENSSFGEFLHWWAMSGYTYQGCMDCLISYKFKDGQSAFARRFWEEAAGTGRLGYVFGCPVRSVVNERDAVRVTARDGREFAAKRLVCTIPLNVLSSVHFSPPLSPQRMAAANIGHVNQCVKVHAEVSCPDMRSWSGISYPFNKLAYAIGDGTTPAGNTHIVCLGGAHNHIQPEEDVEATKMAVENMSPGNMDIKRLVFHNWCKDEFAKGAWFFAPPQLLSKSLDELRCRHGNVLFANSDWALGWRGFIDGAIEEGTRAAVTVIEELRPAPAVRSHL

SEQ ID NO: 293 - DNA, 1485 bp, synthetic construct
  misc_feature 1..1485: note = Variant of monoamine oxidase
  source 1..1485: mol_type = other DNA
atgaccagccgcgacggctatcagtggaccccggaaacgggtctgacccagggcgtaccgtccctgggtgtcatttcgccgccgactaacatcgaagataccgataaggacgggccttgggatgtcattgtcattgggggcgggtattgtgggctgaccgcaacccgtgatttaaccgtcgcagggttcaagacgctgctgctggaggcccgtgatcgtattggtggccgctcctggagcagtaatattgacggttacccgtatgagatgggtggcacttgggttcattggcatcaatctcacgtgtggcgtgaaatcacgcgttataaaatgcacaacgcgctgtctccatcatttaacttttcacgtggcgtgaatcacttccaactgcgtaccaatccgaccaccagtacgtacatgacgcacgaagcggaggatgaactgctgcgtagcgcattgcataaattcaccaatgtcgacctgactaatggccgtacagtgttgccgttcccacatgatatgttttatgtgccggaatttcgcaagtatgacgaaatgtcatattccgaacgcattgaccagatccgcgacgaactgtctttgaacgaacgctctagtttagaggctttcattttattatgtagcggtggcaccctggaaaactccagctttggtgaatttctgcattggtgggcaatgtcgggttacacgtatcagggctgtatggattgtttaatctcctataaatttaaggatggccagagtgcgttcgcgcgtcgcttctgggaagaagccgctggcactggccgtctgggctatgtctttggttgtccggtgcgttctgtggtgaacgaacgcgacgcagtacgtgttaccgcacgtgacggtcgcgaattcgcagcgaaacgtttggtttgcacgattccgctgaacgtattgagttctgttcattttagcccaccactgtccccgcaacgcatggccgctgcgaacattggccatgttaaccagtgcgtcaaagtgcatgcggaagtcagttgtccggatatgcgttcatggtcgggtatctcctatccgttcaacaaattagcctacgctatcggcgatggcacgaccccagcgggtaatacgcatattgtgtgccttgggggggcccataatcatatccagccggaagaggacgtggaagcaacgaagatggccgttgaaaacatgtcgcctgggaatatggatatcaaacgtctggtcttccacaactggtgcaaggatgaatttgccaaaggcgcgtggttcttcgcccctccacagctgctgtcaaagagcctggatgaactgcgctgccgtcacggtaatgtcctgtttgcaaactccgattgggccttaggttggcgtggttttatcgatggtgctatcgaggagggcacccgcgcagcggttactgtaattgaggaactgcgtcctgcgcctgcggtgcgttcccacctg

SEQ ID NO: 294 - protein, 495 aa, synthetic construct
  REGION 1..495: note = Variant of monoamine oxidase
MTSRDGYQWTPETGLTQGVPSLGVISPPTNIEDTDKDGPWDVIVIGGGYCGLTATRDLTVAGFKTLLLEARDRIGGRSWSSNIDGYPYEMGGTWVHWHQSHVWREITRYKMHNALSPSFNFSRGVNHFQLRTNPTTSTYMTHEAEDELLRSALHKFTNVDLTNGRTVLPFPHDMFYVPEFRKYDEMSYSERIDQIRDELSLNERSSLEAFILLCSGGTLENSSFGEFLHWWAMSGYTYQGCMDCLISYKFKDGQSAFARRFWEEAAGTGRLGYVFGCPVRSVVNERDAVRVTARDGREFAAKRLVCTIPLNVLSSVHFSPPLSPQRMAAANIGHVNQCVKVHAEVSCPDMRSWSGISYPFNKLAYAIGDGTTPAGNTHIVCLGGAHNHIQPEEDVEATKMAVENMSPGNMDIKRLVFHNWCKDEFAKGAWFFAPPQLLSKSLDELRCRHGNVLFANSDWALGWRGFIDGAIEEGTRAAVTVIEELRPAPAVRSHL

SEQ ID NO: 295 - DNA, 1485 bp, synthetic construct
  misc_feature 1..1485: note = Variant of monoamine oxidase
  source 1..1485: mol_type = other DNA
atgaccagccgcgacggctatcagtggaccccggaaacgggtctgacccagggcgtaccgtccctgggtgtcatttcgccgccgactaacatcgaagataccgataaggacgggccttgggatgtcattgtcattgggggcgggtattgtgggctgaccgcaacccgtgatttaaccgtcgcagggttcaagacgctgctgctggaggcccgtgatcgtattggtggccgctcctggagcagtaatattgacggttacccgtatgagatgggtggcacttgggttcattggcatcaatctcacgtgtggcgtgaaatcacgcgttataaaatgcacaacgcgctgtctccatcatttaacttttcacgtggcgtgaatcacttccaactgcgtaccaatccgaccaccagtacgtacatgacgcacgaagcggaggatgaactgctgcgtagcgcattgcataaattcaccaatgtcgacggcactaatggccgtacagtgttgccgttcccacatgatatgttttatgtgccggaatttcgcaagtatgacgaaatgtcatattccgaacgcattgaccagatccgcgacgaactgtctttgaacgaacgctctagtttagaggctttcattttattatgtagcggtggcaccctggaaaactccagctttggtgaatttctgcattggtgggcaatgtcgggttacacgtatcagggctgtatggattgtttaatctcctataaatttaaggatggccagagtgcgttcgcgcgtcgcttctgggaagaagccgctggcactggccgtctgggctatgtctttggttgtccggtgcgttctgtggtgaacgaacgcgacgcagtacgtgttaccgcacgtgacggtcgcgaattcgcagcgaaacgtttggtttgcacgattccgctgaacgtattgagttctgttcattttagcccaccactgtccccgcaacgcatggccgctgcgaacattggccatgttaaccagtgcgtcaaagtgcatgcggaagtcagttgtccggatatgcgttcatggtcgggtatctcctatccgttcaacaaattagcctacgctatcggcgatggcacgaccccagcgggtaatacgcatattgtgtgccttgggggggcccatattcatatccagccggaagaggacgtggaagcaacgaagatggccgttgaaaacatgtcgcctgggaatatggatatcaaacgtctggtcttccacaactggtgcaaggatgaatttgccaaaggcgcgtggttcttcgcccctccacagctgctgtcaaagagcctggatgaactgcgctgccgtcacggtaatgtcctgtttgcaaactccgattgggccttaggttggcgtggttttatcgatggtgctatcgaggagggcacccgcgcagcggttactgtaattgaggaactgcgtcctgcgcctgcggtgcgttcccacctg

SEQ ID NO: 296 - protein, 495 aa, synthetic construct
  REGION 1..495: note = Variant of monoamine oxidase
MTSRDGYQWTPETGLTQGVPSLGVISPPTNIEDTDKDGPWDVIVIGGGYCGLTATRDLTVAGFKTLLLEARDRIGGRSWSSNIDGYPYEMGGTWVHWHQSHVWREITRYKMHNALSPSFNFSRGVNHFQLRTNPTTSTYMTHEAEDELLRSALHKFTNVDGTNGRTVLPFPHDMFYVPEFRKYDEMSYSERIDQIRDELSLNERSSLEAFILLCSGGTLENSSFGEFLHWWAMSGYTYQGCMDCLISYKFKDGQSAFARRFWEEAAGTGRLGYVFGCPVRSVVNERDAVRVTARDGREFAAKRLVCTIPLNVLSSVHFSPPLSPQRMAAANIGHVNQCVKVHAEVSCPDMRSWSGISYPFNKLAYAIGDGTTPAGNTHIVCLGGAHIHIQPEEDVEATKMAVENMSPGNMDIKRLVFHNWCKDEFAKGAWFFAPPQLLSKSLDELRCRHGNVLFANSDWALGWRGFIDGAIEEGTRAAVTVIEELRPAPAVRSHL

SEQ ID NO: 297 - DNA, 1485 bp, synthetic construct
  misc_feature 1..1485: note = Variant of monoamine oxidase
  source 1..1485: mol_type = other DNA
atgaccagccgcgacggctatcagtggaccccggaaacgggtctgacccagggcgtaccgtccctgggtgtcatttcgccgccgactaacatcgaagataccgataaggacgggccttgggatgtcattgtcattgggggggggtattgtgggctgaccgcaacccgtgatttaaccgtcgcagggttcaagacgctgctgctggaggcccgtgatcgtattggtggccgctcctggagcagtaatattgacggttacccgtatgagatgggtggcacttgggttcattggcatcaaccgcacgtgtggcgtgaaatcacgcgttataaaatgcacaacgcgctgtctccatcatttaacttttcacgtggcgtgaatcacttccaactgcgtaccaatccgaccaccagtacgtacatgacgcacgaagcggaggatgaactgctgcgtagcgcattgcataaattcaccaatgtcgacggcactaatggccgtacagtgttgccgttcccacatgatatgttttatgtgccggaatttcgcaagtatgacgaaatgtcatattccgaacgcattgaccagatccgcgacgaactgagcctgaacgaacgctctagtttagaggctttcattttattatgtagcggtggcaccctggaaaactccagctttggtgaatttctgcattggtgggcaatgtcgggttacacgtatcagggctgtatggattgtttaatctcctataaatttaaggatggccagagtgcgttcgcgcgtcgcttctgggaagaagccgcaggcactggccgtctgggctatgtctttggttgtccggtgcgttctgtggtgaacgaacgcgacgcagtacgtgttaccgcacgtgacggtcgcgaattcgcagcgaaacgtttggtctgcacgattccgctgaacgtattgagttctgttcattttagcccaccactgtccccgcaacgcatggccgctgcgaacattggccatgttaaccagtgcgtcaaagtgcatgcggaagtcagttgtccggatatgcgttcatggtcgggtatctcctatccgttcaacaaattagcctacgctatcggcgatggcacgaccccagcgggtaatacgcatattgtgtgccttgggggggcccataatcatatccagccggaagaggacgtggaagcaacgaagatggccgttgaaaacatgtcgcctgggaatatggatatcaaacgtctggtcttccacaactggtgcaaggatgaatttgccaaaggcgcgtggttcttcgcccctccacagctgctgtcaaagagcctggatgaactgcgctgccgtcacggtaatgtcctgtttgcaaactccgattgggccttaggttggcgtggttttatcgatggtgctatcgaggagggcacccgcgcagcggttactgtaattgaggaactgcgtcctgcgcctgcggtgcgttcccacctg

SEQ ID NO: 298 - protein, 495 aa, synthetic construct
  REGION 1..495: note = Variant of monoamine oxidase
MTSRDGYQWTPETGLTQGVPSLGVISPPTNIEDTDKDGPWDVIVIGGGYCGLTATRDLTVAGFKTLLLEARDRIGGRSWSSNIDGYPYEMGGTWVHWHQPHVWREITRYKMHNALSPSFNFSRGVNHFQLRTNPTTSTYMTHEAEDELLRSALHKFTNVDGTNGRTVLPFPHDMFYVPEFRKYDEMSYSERIDQIRDELSLNERSSLEAFILLCSGGTLENSSFGEFLHWWAMSGYTYQGCMDCLISYKFKDGQSAFARRFWEEAAGTGRLGYVFGCPVRSVVNERDAVRVTARDGREFAAKRLVCTIPLNVLSSVHFSPPLSPQRMAAANIGHVNQCVKVHAEVSCPDMRSWSGISYPFNKLAYAIGDGTTPAGNTHIVCLGGAHNHIQPEEDVEATKMAVENMSPGNMDIKRLVFHNWCKDEFAKGAWFFAPPQLLSKSLDELRCRHGNVLFANSDWALGWRGFIDGAIEEGTRAAVTVIEELRPAPAVRSHL

SEQ ID NO: 299 - DNA, 1485 bp, synthetic construct
  misc_feature 1..1485: note = Variant of monoamine oxidase
  source 1..1485: mol_type = other DNA
atgaccagccgcgacggctatcagtggaccccggaaacgggtctgacccagggcgtaccgtccctgggtgtcatttcgccgccgactaacatcgaagataccgataaggacgggccttgggatgtcattgtcattgggggcgggtattgtgggctgaccgcaacccgtgatttaaccgtcgcagggttcaagacgctgctgctggaggcccgtgatcgtattggtggccgctcctggagcagtaatattgacggttacccgtatgagatgggtggcacttgggttcattggcatcaatctcacgtgtggcgtgaaatcacgcgttataaaatgcacaacgcgctgtctccatcatttaacttttcacgtggcgtgaatcacttccaactgcgtaccaatccgaccaccagtacgtacatgacgcacgaagcggaggatgaactgctgcgtagcgcattgcataaattcaccaatgtcgacggcactaatggccgtacagtgttgccgttcccacatgatatgttttatgtgccggaatttcgcaagtatgacgaaatgtcatattccgaacgcattgaccagatccgcgacgaactgtctttgaacgaacgctctagtttagaggctttcattttattatgtagcggtggcaccctggaaaactccagctttggtgaatttctgcattggtgggcaatgtcgggttacacgtatcagggctgtatggattgtttaatctcctataaatttaaggatggccagagtgcgttcgcgcgtcgcttctgggaagaagccgctggcactggccgtctgggctatgtctttggttgtccggtgcgttctgtggtgaacgaacgcgacgcagtacgtgttaccgcacgtgacggtcgcgaattcgcagcgaaacgtttggtttgcacgattccgctgaacgtattgagttctgttcattttagcccaccactgtccccgcaacgcatggccgctgcgaacattggccatgttaaccagtgcgtcaaagtgcatgcggaagtcagttgtccggatatgcgttcatggtcgggtatctcctatccgttcaacaaattagcctacgctatcggcgatggcacgaccccagcgggtaatacgcatattgtgtgccttgggggggcccataatcatatccagccggaagaggacgtggaagcaacgaaggatgccgttgaaaacatgtcgcctgggaatatggatatcaaacgtctggtcttccacaactggtgcaaggatgaatttgccaaaggcgcgtggttcttcgcccctccacagctgctgtcaaagagcctggatgaactgcgctgccgtcacggtaatgtcctgtttgcaaactccgattgggccttaggttggcgtggttttatcgatggtgctatcgaggagggcacccgcgcagcggttactgtaattgaggaactgcgtcctgcgcctgcggtgcgttcccacctg

SEQ ID NO: 300 - protein, 495 aa, synthetic construct
  REGION 1..495: note = Variant of monoamine oxidase
MTSRDGYQWTPETGLTQGVPSLGVISPPTNIEDTDKDGPWDVIVIGGGYCGLTATRDLTVAGFKTLLLEARDRIGGRSWSSNIDGYPYEMGGTWVHWHQSHVWREITRYKMHNALSPSFNFSRGVNHFQLRTNPTTSTYMTHEAEDELLRSALHKFTNVDGTNGRTVLPFPHDMFYVPEFRKYDEMSYSERIDQIRDELSLNERSSLEAFILLCSGGTLENSSFGEFLHWWAMSGYTYQGCMDCLISYKFKDGQSAFARRFWEEAAGTGRLGYVFGCPVRSVVNERDAVRVTARDGREFAAKRLVCTIPLNVLSSVHFSPPLSPQRMAAANIGHVNQCVKVHAEVSCPDMRSWSGISYPFNKLAYAIGDGTTPAGNTHIVCLGGAHNHIQPEEDVEATKDAVENMSPGNMDIKRLVFHNWCKDEFAKGAWFFAPPQLLSKSLDELRCRHGNVLFANSDWALGWRGFIDGAIEEGTRAAVTVIEELRPAPAVRSHL

SEQ ID NO: 301 - DNA, 1485 bp, synthetic construct
  misc_feature 1..1485: note = Variant of monoamine oxidase
  source 1..1485: mol_type = other DNA
atgaccagccgcgacggctatcagtggaccccggaaacgggtctgacccagggcgtaccgtccctgggtgtcatttcgccgccgactaacatcgaagataccgataaggacgggccttgggatgtcattgtcattgggggcgggtattgtgggctgaccgcaacccgtgatttaaccgtcgcagggttcaagacgctgctgctggaggcccgtgatcgtattggtggccgctcctggagcagtaatattgacggttacccgtatgagatgggtggcacttgggttcattggcatcaatctcacgtgtggcgtgaaatcacgcgttataaaatgcacaacgcgctgtctccatcatttaacttttcacgtggcgtgaatcacttccaactgcgtaccaatccgaccaccagtacgtacatgacgcacgaagcggaggatgaactgctgcgtagcgcattgcataaattcaccaatgtcgacggcactaatggccgtacagtgttgccgttcccacatgatatgttttatgtgccggaatttcgcaagtatgacgaaatgtcatattccgaacgcattgaccagatccgcgacgaactgtctttgaacgaacgctctagtttagaggctttcattttattatgtagcggtggcaccctggaaaactccagctttggtgaatttctgcattggtgggcaatgtcgggttacacgtatcagggctgtatggattgtttaatctcctataaatttaaggatggccagagtgcgttcgcgcgtcgcttctgggaagaagccgctggcactggccgtctgggctatgtctttggttgtccggtgcgttctgtggtgaacgaacgcgacgcagtacgtgttaccgcacgtgacggtcgcgaattcgcagcgaaacgtttggtttgcacgattccgctgaacgtattgagttctgttcattttagcccaccactgtccccgcaacgcatggccgctgcgaacattggccatgttaaccagtgcgtcaaagtgcatgcggaagtcagttgtccggatatgcgttcatggtcgggtatctcctatccgttcaacaaattagcctacgctatcggcgatggcacgaccccagcgggtaatacgcatattgtgtgccttgggggggcccataatcatatccagccggaagaggacgtggaagcaacgaagatggccgttgaaaacatgtcgggggggaatatggatatcaaacgtctggtcttccacaactggtgcaaggatgaatttgccaaaggcgcgtggttcttcgcccctccacagctgctgtcaaagagcctggatgaactgcgctgccgtcacggtaatgtcctgtttgcaaactccgattgggccttaggttggcgtggttttatcgatggtgctatcgaggagggcacccgcgcagcggttactgtaattgaggaactgcgtcctgcgcctgcggtgcgttcccacctg

SEQ ID NO: 302 - protein, 495 aa, synthetic construct
  REGION 1..495: note = Variant of monoamine oxidase
MTSRDGYQWTPETGLTQGVPSLGVISPPTNIEDTDKDGPWDVIVIGGGYCGLTATRDLTVAGFKTLLLEARDRIGGRSWSSNIDGYPYEMGGTWVHWHQSHVWREITRYKMHNALSPSFNFSRGVNHFQLRTNPTTSTYMTHEAEDELLRSALHKFTNVDGTNGRTVLPFPHDMFYVPEFRKYDEMSYSERIDQIRDELSLNERSSLEAFILLCSGGTLENSSFGEFLHWWAMSGYTYQGCMDCLISYKFKDGQSAFARRFWEEAAGTGRLGYVFGCPVRSVVNERDAVRVTARDGREFAAKRLVCTIPLNVLSSVHFSPPLSPQRMAAANIGHVNQCVKVHAEVSCPDMRSWSGISYPFNKLAYAIGDGTTPAGNTHIVCLGGAHNHIQPEEDVEATKMAVENMSGGNMDIKRLVFHNWCKDEFAKGAWFFAPPQLLSKSLDELRCRHGNVLFANSDWALGWRGFIDGAIEEGTRAAVTVIEELRPAPAVRSHL

SEQ ID NO: 303 - DNA, 1485 bp, synthetic construct
  misc_feature 1..1485: note = Variant of monoamine oxidase
  source 1..1485: mol_type = other DNA
atgaccagccgcgacggctatcagtggaccccggaaacgggtctgacccagggcgtaccgtccctgggtgtcatttcgccgccgactaacatcgaagataccgataaggacgggccttgggatgtcattgtcattgggggcgggtattgtgggctgaccgcaacccgtgatttaaccgtcgcagggttcaagacgctgctgctggaggcccgtgatcgtattggtggccgctcctggagcagtaatattgacggttacccgtatgagatgggtggcacttgggttcattggcatcaatctcacgtgtggcgtgaaatcacgcgttataaaatgcacaacgcgctgtctccatcatttaacttttcacgtggcgtgaatcacttccaactgcgtaccaatccgaccaccagtacgtacatgacgcacgaagcggaggatgaactgctgcgtagcgcattgcataaattcaccaatgtcgacggcactaatggccgtacagtgttgccgttcccacatgatatgttttatgtgccggaatttcgcaagtatgacgaaatgtcatattccgaacgcattgaccagatccgcgacgaactgtctttgaacgaacgctctagtttagaggctttcattttattatgtagcggtggcaccctggaaaactccagctttggtgaatttctgcattggtgggcaatgtcgggttacacgtatgggggctgtatggattgtttaatctcctataaatttaaggatggccagagtgcgttcgcgcgtcgcttctgggaagaagccgctggcactggccgtctgggctatgtctttggttgtccggtgcgttctgtggtgaacgaacgcgacgcagtacgtgttaccgcacgtgacggtcgcgaattcgcagcgaaacgtttggtttgcacgattccgctgaacgtattgagttctgttcattttagcccaccactgtccccgcaacgcatggccgctgcgaacattggccatgttaaccagtgcgtcaaagtgcatgcggaagtcagttgtccggatatgcgttcatggtcgggtatctcctatccgttcaacaaattagcctacgctatcggcgatggcacgaccccagcgggtaatacgcatattgtgtgccttgggggggcccataatcatatccagccggaagaggacgtggaagcaacgaagatggccgttgaaaacatgtcgcctgggaatatggatatcaaacgtctggtcttccacaactggtgcaaggatgaatttgccaaaggcgcgtggttcttcgcccctccacagctgctgtcaaagagcctggatgaactgcgctgccgtcacggtaatgtcctgtttgcaaactccgattgggccttaggttggcgtggttttatcgatggtgctatcgaggagggcacccgcgcagcggttactgtaattgaggaactgcgtcctgcgcctgcggtgcgttcccacctg

SEQ ID NO: 304 - protein, 495 aa, synthetic construct
  REGION 1..495: note = Variant of monoamine oxidase
MTSRDGYQWTPETGLTQGVPSLGVISPPTNIEDTDKDGPWDVIVIGGGYCGLTATRDLTVAGFKTLLLEARDRIGGRSWSSNIDGYPYEMGGTWVHWHQSHVWREITRYKMHNALSPSFNFSRGVNHFQLRTNPTTSTYMTHEAEDELLRSALHKFTNVDGTNGRTVLPFPHDMFYVPEFRKYDEMSYSERIDQIRDELSLNERSSLEAFILLCSGGTLENSSFGEFLHWWAMSGYTYGGCMDCLISYKFKDGQSAFARRFWEEAAGTGRLGYVFGCPVRSVVNERDAVRVTARDGREFAAKRLVCTIPLNVLSSVHFSPPLSPQRMAAANIGHVNQCVKVHAEVSCPDMRSWSGISYPFNKLAYAIGDGTTPAGNTHIVCLGGAHNHIQPEEDVEATKMAVENMSPGNMDIKRLVFHNWCKDEFAKGAWFFAPPQLLSKSLDELRCRHGNVLFANSDWALGWRGFIDGAIEEGTRAAVTVIEELRPAPAVRSHL

SEQ ID NO: 305 - DNA, 1485 bp, synthetic construct
  misc_feature 1..1485: note = Variant of monoamine oxidase
  source 1..1485: mol_type = other DNA
atgaccagccgcgacggctatcagtggaccccggaaacgggtctgacccagggcgtaccgtccctgggtgtcatttcgccgccgactaacatcgaagataccgataaggacgggccttgggatgtcattgtcattgggggcgggtattgtgggctgaccgcaacccgtgatttaaccgtcgcagggttcaagacgctgctgctggaggcccgtgatcgtattggtggccgctcctggagcagtaatattgacggttacccgtatgagatgggtggcacttgggttcattggcatcaatctcacgtgtggcgtgaaatcacgcgttataaaatgcacaacggtctgtctccatcatttaacttttcacgtggcgtgaatcacttccaactgcgtaccaatccgaccaccagtacgtacatgacgcacgaagcggaggatgaactgctgcgtagcgcattgcataaattcaccaatgtcgacggcactaatggccgtacagtgttgccgttcccacatgatatgttttatgtgccggaatttcgcaagtatgacgaaatgtcatattccgaacgcattgaccagatccgcgacgaactgtctttgaacgaacgctctagtttagaggctttcattttattatgtagcggtggcaccctggaaaactccagctttggtgaatttctgcattggtgggcaatgtcgggttacacgtatcagggctgtatggattgtttaatctcctataaatttaaggatggccagagtgcgttcgcgcgtcgcttctgggaagaagccgctggcactggccgtctgggctatgtctttggttgtccggtgcgttctgtggtgaacgaacgcgacgcagtacgtgttaccgcacgtgacggtcgcgaattcgcagcgaaacgtttggtttgcacgattccgctgaacgtattgagttctgttcattttagcccaccactgtccccgcaacgcatggccgctgcgaacattggccatgttaaccagtgcgtcaaagtgcatgcggaagtcagttgtccggatatgcgttcatggtcgggtatctcctatccgttcaacaaattagcctacgctatcggcgatggcacgaccccagcgggtaatacgcatattgtgtgccttgggggggcccataatcatatccagccggaagaggacgtggaagcaacgaagatggccgttgaaaacatgtcgcctgggaatatggatatcaaacgtctggtcttccacaactggtgcaaggatgaatttgccaaaggcgcgtggttcttcgcccctccacagctgctgtcaaagagcctggatgaactgcgctgccgtcacggtaatgtcctgtttgcaaactccgattgggccttaggttggcgtggttttatcgatggtgctatcgaggagggcacccgcgcagcggttactgtaattgaggaactgcgtcctgcgcctgcggtgcgttcccacctg

SEQ ID NO: 306 - protein, 495 aa, synthetic construct
  REGION 1..495: note = Variant of monoamine oxidase
MTSRDGYQWTPETGLTQGVPSLGVISPPTNIEDTDKDGPWDVIVIGGGYCGLTATRDLTVAGFKTLLLEARDRIGGRSWSSNIDGYPYEMGGTWVHWHQSHVWREITRYKMHNGLSPSFNFSRGVNHFQLRTNPTTSTYMTHEAEDELLRSALHKFTNVDGTNGRTVLPFPHDMFYVPEFRKYDEMSYSERIDQIRDELSLNERSSLEAFILLCSGGTLENSSFGEFLHWWAMSGYTYQGCMDCLISYKFKDGQSAFARRFWEEAAGTGRLGYVFGCPVRSVVNERDAVRVTARDGREFAAKRLVCTIPLNVLSSVHFSPPLSPQRMAAANIGHVNQCVKVHAEVSCPDMRSWSGISYPFNKLAYAIGDGTTPAGNTHIVCLGGAHNHIQPEEDVEATKMAVENMSPGNMDIKRLVFHNWCKDEFAKGAWFFAPPQLLSKSLDELRCRHGNVLFANSDWALGWRGFIDGAIEEGTRAAVTVIEELRPAPAVRSHL

SEQ ID NO: 307 - DNA, 1485 bp, synthetic construct
  misc_feature 1..1485: note = Variant of monoamine oxidase
  source 1..1485: mol_type = other DNA
atgaccagccgcgacggctatcagtggaccccggaaacgggtctgacccagggcgtaccgtccctgggtgtcatttcgccgccgactaacatcgaggataccgataaggacgggccttgggatgtcattgtcattgggggcgggtattgtgggctgaccgcaacccgtgatttaaccgtcgcagggttcaaggtactgctgctggaggcccgtgatcgtattggtggccgctcctggagcagtaatattgacggttacccgtatgagatgggtggcacttgggttcattggcatcaatctcacgtgtggcgtgaaatcacgcgttataaaatgcacaacgcgctgtctccatcatttaacttttcacgtggcgtgaatcacttccaactgcgtaccaatccgactaccagtacgtacatgacgcacgaagcggaggatgaactgctgcgtagcgcattgcataaattcaccaatgtcgacggcactaatggccgtacagtgttgccgttcccacatgatatgttttatgtgccggaatttcgcaagtatgacgaaatgtcatattccgaacgcattgaccagatccgcgacgaactgtctttgaacgaacgctctagtttagaggctttcattttattatgtagcggtggcaccctggaaaactccagctttggtgaatttctgcattggtgggcaatgtcgggttacacgtatcagggctgtatggattgtttaatctcctataaatttaaggatggccagagtgcgttcgcgcgtcgcttctgggaagaagccgctggcactggccgtctgggctatgtctttggttgtccggtgcgttctgtggtggacgaacgcgacgcagtacgtgttaccgcacgtgacggtcgcgaattcgcagcgaaacgtttggtttgcacgattccgctgaacgtattgagttctgttcattttagcccaccactgtccccgcaacgcatggccgctgcgaacattggccatgttaaccagtgcgtcaaagtgcatgcggaagtcagttgtccggatatgcgttcatggtcgggtatctcctatccgttcaacaaattagcctacgctatcggcgatggcacgaccccagcgggtaatacgcatattgtgtgccttgggggggcgcataatcatatccagccggaagaggacgtggaagcaacgaagatggccgttgaaaacatgtcgcctgggaatatggatatcaaacgtctggtcttccacaactggtgcaaggatgaatttgccaaaggcgcgtggttcttcgcccctccacagctgctgtcaaagagcctggatgaactgcgctgccgtcacggtaatgtcctgtttgcaaactccgattgggccttaggttggcgtggttttatcgatggtgctatcgaggagggcacccgcgcagcggttactgtaattgaggaactgcgtcctgcgcctgcggtgcgttcccacctg

SEQ ID NO: 308 - protein, 495 aa, synthetic construct
  REGION 1..495: note = Variant of monoamine oxidase
MTSRDGYQWTPETGLTQGVPSLGVISPPTNIEDTDKDGPWDVIVIGGGYCGLTATRDLTVAGFKVLLLEARDRIGGRSWSSNIDGYPYEMGGTWVHWHQSHVWREITRYKMHNALSPSFNFSRGVNHFQLRTNPTTSTYMTHEAEDELLRSALHKFTNVDGTNGRTVLPFPHDMFYVPEFRKYDEMSYSERIDQIRDELSLNERSSLEAFILLCSGGTLENSSFGEFLHWWAMSGYTYQGCMDCLISYKFKDGQSAFARRFWEEAAGTGRLGYVFGCPVRSVVDERDAVRVTARDGREFAAKRLVCTIPLNVLSSVHFSPPLSPQRMAAANIGHVNQCVKVHAEVSCPDMRSWSGISYPFNKLAYAIGDGTTPAGNTHIVCLGGAHNHIQPEEDVEATKMAVENMSPGNMDIKRLVFHNWCKDEFAKGAWFFAPPQLLSKSLDELRCRHGNVLFANSDWALGWRGFIDGAIEEGTRAAVTVIEELRPAPAVRSHL

SEQ ID NO: 309 - DNA, 1485 bp, synthetic construct
  misc_feature 1..1485: note = Variant of monoamine oxidase
  source 1..1485: mol_type = other DNA
atgaccagccgcgacggctatcagtggaccccggaaacgggtctgacccagggcgtaccgtccctgggtgtcatttcgccgccgactaacatcggggataccgataaggacgggccttgggatgtcattgtcattgggggcgggtattgtgggctgaccgcaacccgtgatttaaccgtcgcagggttcaagacgctgctgctggaggcccgtgatcgtattggtggccgctcctggagcagtaatattgacggttacccgtatgagatgggtggcacttgggttcattggcatcaatctcacgtgtggcgtgaaatcacgcgttataaaatgcacaacgcgctgtctccatcatttaacttttcacgtggcgtgaatcacttccaactgcgtaccaatccgcaaaccagtacgtacatgacgcacgaagcggaggatgaactgctgcgtagcgcattgcataaattcaccaatgtcgacggcactaatggccgtacagtgttgccgttcccacatgatatgttttatgtgccggaatttcgcaagtatgacgaaatgtcatattccgaacgcattgaccagatccgcgacgaactgtctttgaacgaacgctctagtttagaggctttcattttattatgtagcggtggcaccctggaaaactccagctttggtgaatttctgcattggtgggcaatgtcgggttacacgtatcagggctgtatggattgtttaatctcctataaatttaaggatggccagagtgcgttcgcgcgtcgcttctgggaagaagccgctggcactggccgtctgggctatgtctttggttgtccggtgcgttctgtggtggacgaacgcgacgcagtacgtgttaccgcacgtgacggtcgcgaattcgcagcgaaacgtttggtttgcacgattccgctgaacgtattgagttctgttcattttagcccaccactgtccccgcaacgcatggccgctgcgaacattggccatgttaaccagtgcgtcaaagtgcatgcggaagtcagttgtccggatatgcgttcatggtcgggtatctcctatccgttcaacaaattagcctacgctatcggcgatggcacgaccccagcgggtaatacgcatattgtgtgccttgggggggcgcataatcatatccagccggaagaggacgtggaagcaacgaagatggccgttgaaaacatgtcgcctgggaatatggatatcaaacgtctggtcttccacaactggtgcaaggatgaatttgccaaaggcgcgtggttcttcgcccctccacagctgctgtcaaagagcctggatgaactgcgctgccgtcacggtaatgtcctgtttgcaaactccgattgggccttaggttggcgtggttttatcgatggtgctatcgaggagggcacccgcgcagcggttactgtaattgaggaactgcgtcctgcgcctgcggtgcgttcccacctg

SEQ ID NO: 310 - protein, 495 aa, synthetic construct
  REGION 1..495: note = Variant of monoamine oxidase
MTSRDGYQWTPETGLTQGVPSLGVISPPTNIGDTDKDGPWDVIVIGGGYCGLTATRDLTVAGFKTLLLEARDRIGGRSWSSNIDGYPYEMGGTWVHWHQSHVWREITRYKMHNALSPSFNFSRGVNHFQLRTNPQTSTYMTHEAEDELLRSALHKFTNVDGTNGRTVLPFPHDMFYVPEFRKYDEMSYSERIDQIRDELSLNERSSLEAFILLCSGGTLENSSFGEFLHWWAMSGYTYQGCMDCLISYKFKDGQSAFARRFWEEAAGTGRLGYVFGCPVRSVVDERDAVRVTARDGREFAAKRLVCTIPLNVLSSVHFSPPLSPQRMAAANIGHVNQCVKVHAEVSCPDMRSWSGISYPFNKLAYAIGDGTTPAGNTHIVCLGGAHNHIQPEEDVEATKMAVENMSPGNMDIKRLVFHNWCKDEFAKGAWFFAPPQLLSKSLDELRCRHGNVLFANSDWALGWRGFIDGAIEEGTRAAVTVIEELRPAPAVRSHL

SEQ ID NO: 311 - DNA, 1485 bp, synthetic construct
  misc_feature 1..1485: note = Variant of monoamine oxidase
  source 1..1485: mol_type = other DNA
atgaccagccgcgacggctatcagtggaccccggaaacgggtctgacccagggcgtaccgtccctgggtgtcatttcgccgccgactaacatcgaagataccgataaggacgggccttgggatgtcattgtcattgggggcgggtattgtgggctgaccgcaacccgtgatttaaccgtcgcagggttcaagacgctgctgctggaggcccgtgatcgtattggtggccgctcctggagcagtaatattgactcttacccgtatgagatgggtggcacttgggttcattggcatcaatctcacgtgtggcgtgaaatcacgcgttataaaatgcacaacgcgctgtctccatcatttaacttttcacgtggcgtgaatcacttccaactgcgtaccaatccgaccaccagtacgtacatgacgcacgaagcggaggatgaactgctgcgtagcgcattgcataaattcaccaatgtcgacggcactaatggccgtacagtgttgccgttcccacatgatatgttttatgtgccggaatttcgcaagtatgacgaaatgtcatattccgaacgcattgaccagatccgcgacgaactgtctttgaacgaacgctctagtttagaggctttcattttattatgtagcggtggcaccctggaaaactccagctttggtgaatttctgcattggtgggcaatgtcgggttacacgtatcagggctgtatggattgtttaatctcctataaatttaaggatggccagagtgcgttcgcgcgtcgcttctgggaagaagccgctggcactggccgtctgggctatgtctttggttgtccggtgcgttctgtggtgaacgaacgcgacgcagtacgtgttaccgcacgtgacggtcgcgaattcgcagcgaaacgtttggtttgcacgattccgctgaacgtattgagttctgttcattttagcccaccactgtccccgcaacgcatggccgctgcgaacattggccatgttaaccagtgcgtcaaagtgcatgcggaagtcagttgtccggatatgcgttcatggtcgggtatctcctatccgttcaacaaattagcctacgctatcggcgatggcacgaccccagcgggtaatacgcatattgtgtgccttgggggggcccataatcatatccagccggaagaggacgtggaagcaacgaagatggccgttgaaaacatgtcgcctgggaatatggatatcaaacgtctggtcttccacaactggtgcaaggatgaatttgccaaaggcgcgtggttcttcgcccctccacagctgctgtcaaagagcctggatgaactgcgctgccgtcacggtaatgtcctgtttgcaaactccgattgggccttaggttggcgtggttttatcgatggtgctatcgaggagggcacccgcgcagcggttactgtaattgaggaactgcgtcctgcgcctgcggtgcgttcccacctg

SEQ ID NO: 312 - protein, 495 aa, synthetic construct
  REGION 1..495: note = Variant of monoamine oxidase
MTSRDGYQWTPETGLTQGVPSLGVISPPTNIEDTDKDGPWDVIVIGGGYCGLTATRDLTVAGFKTLLLEARDRIGGRSWSSNIDSYPYEMGGTWVHWHQSHVWREITRYKMHNALSPSFNFSRGVNHFQLRTNPTTSTYMTHEAEDELLRSALHKFTNVDGTNGRTVLPFPHDMFYVPEFRKYDEMSYSERIDQIRDELSLNERSSLEAFILLCSGGTLENSSFGEFLHWWAMSGYTYQGCMDCLISYKFKDGQSAFARRFWEEAAGTGRLGYVFGCPVRSVVNERDAVRVTARDGREFAAKRLVCTIPLNVLSSVHFSPPLSPQRMAAANIGHVNQCVKVHAEVSCPDMRSWSGISYPFNKLAYAIGDGTTPAGNTHIVCLGGAHNHIQPEEDVEATKMAVENMSPGNMDIKRLVFHNWCKDEFAKGAWFFAPPQLLSKSLDELRCRHGNVLFANSDWALGWRGFIDGAIEEGTRAAVTVIEELRPAPAVRSHL

SEQ ID NO: 313 - DNA, 1485 bp, synthetic construct
  misc_feature 1..1485: note = Variant of monoamine oxidase
  source 1..1485: mol_type = other DNA
atgaccagccgcgacggctatcagtggaccccggaaacgggtctgacccagggcgtaccgtccctgggtgtcatttcgccgccgactaacatcgaagataccgataaggacgggccttgggatgtcattgtcattgggggcgggtattgtgggctgaccgcaacccgtgatttaaccgtcgcagggttcaagacgctgctgctggaggcccgtgatcgtattggtggccgctcctatagcagtaatattgacggttacccgtatgagatgggtggcacttgggttcattggcatcaatctcacgtgtggcgtgaaatcacgcgttataaaatgcacaacgcgctgtctccatcatttaacttttcacgtggcgtgaatcacttccaactgcgtaccaatccgaccaccagtacgtacatgacgcacgaagcggaggatgaactgctgcgtagcgcattgcataaattcaccaatgtcgacggcactaatggccgtacagtgttgccgttcccacatgatatgttttatgtgccggaatttcgcaagtatgacgaaatgtcatattccgaacgcattgaccagatccgcgacgaactgtctttgaacgaacgctctagtttagaggctttcattttattatgtagcggtggcaccctggaaaactccagctttggtgaatttctgcattggtgggcaatgtcgggttacacgtatcagggctgtatggattgtttaatctcctataaatttaaggatggccagagtgcgttcgcgcgtcgcttctgggaagaagccgctggcactggccgtctgggctatgtctttggttgtccggtgcgttctgtggtgaacgaacgcgacgcagtacgtgttaccgcacgtgacggtcgcgaattcgcagcgaaacgtttggtttgcacgattccgctgaacgtattgagttctgttcattttagcccaccactgtccccgcaacgcatggccgctgcgaacattggccatgttaaccagtgcgtcaaagtgcatgcggaagtcagttgtccggatatgcgttcatggtcgggtatctcctatccgttcaacaaattagcctacgctatcggcgatggcacgaccccagcgggtaatacgcatattgtgtgccttgggggggcccataatcatatccagccggaagaggacgtggaagcaacgaagatggccgttgaaaacatgtcgcctgggaatatggatatcaaacgtctggtcttccacaactggtgcaaggatgaatttgccaaaggcgcgtggttcttcgcccctccacagctgctgtcaaagagcctggatgaactgcgctgccgtcacggtaatgtcctgtttgcaaactccgattgggccttaggttggcgtggttttatcgatggtgctatcgaggagggcacccgcgcagcggttactgtaattgaggaactgcgtcctgcgcctgcggtgcgttcccacctg

SEQ ID NO: 314 - protein, 495 aa, synthetic construct
  REGION 1..495: note = Variant of monoamine oxidase
MTSRDGYQWTPETGLTQGVPSLGVISPPTNIEDTDKDGPWDVIVIGGGYCGLTATRDLTVAGFKTLLLEARDRIGGRSYSSNIDGYPYEMGGTWVHWHQSHVWREITRYKMHNALSPSFNFSRGVNHFQLRTNPTTSTYMTHEAEDELLRSALHKFTNVDGTNGRTVLPFPHDMFYVPEFRKYDEMSYSERIDQIRDELSLNERSSLEAFILLCSGGTLENSSFGEFLHWWAMSGYTYQGCMDCLISYKFKDGQSAFARRFWEEAAGTGRLGYVFGCPVRSVVNERDAVRVTARDGREFAAKRLVCTIPLNVLSSVHFSPPLSPQRMAAANIGHVNQCVKVHAEVSCPDMRSWSGISYPFNKLAYAIGDGTTPAGNTHIVCLGGAHNHIQPEEDVEATKMAVENMSPGNMDIKRLVFHNWCKDEFAKGAWFFAPPQLLSKSLDELRCRHGNVLFANSDWALGWRGFIDGAIEEGTRAAVTVIEELRPAPAVRSHL

SEQ ID NO: 315 - DNA, 1485 bp, synthetic construct
  misc_feature 1..1485: note = Variant of monoamine oxidase
  source 1..1485: mol_type = other DNA
atgaccagccgcgacggctatcagtggaccccggaaacgggtctgacccagggcgtaccgtccctgggtgtcatttcgccgccgactaacatcgaagataccgataaggacgggccttgggatgtcattgtcattgggggcgggtattgtgggctgaccgcaacccgtgatttaaccgtcgcagggttcaagacgctgctgctggaggcccgtgatcgtattggtggccgctcctggagcagtaatattgacggttacccgtatgagatgggtggcacttgggttcattggcatcaatctcacgtgtggcgtgaaatcacgcgttataaaatgcacaacgcgctgtctccatcatttaacttttcacgtggcgtgaatcacttccaactgcgtaccaatccgaccaccagtacgtacatgacgcacgaagcggaggatgaactgctgcgtagcgcattgcataaattcaccaatgtcgacggcactaatggccgtacagtgttgccgttcccacatgatatgttttatgtgccggaatttcgcaagtatgacgaaatgtcatattccgaacgcattgaccagatccgcgacgaactgtctttgaacgaacgctctagtttagaggctttcattttattatgtagcggtggcaccctggaaaactccagctttggtgaatttctgcattggtgggcaatgtcgggttacacgtatcagggctgtatggattgtttaatctcctataaatttaaggatggccagagtgcgttcgcgcgtcgcttctgggaagaagccgctggcactggccgtctgggctatgtctttggttgtccggtgcgttctgtggtgaacgaacgcgacgcagtacgtgttaccgcacgtgacggtcgcgaattcgcagcgaaacgtttggtttgcacgattccgctgaacgtattgagttctgttcattttagcccaccactgtccccgcaacgcatggccgctgcgaacattggccatgttaaccagtgcgtcaaagtgcatgcggaagtcagttgtccggatatgcgttcatggtcgggtatctcctatccgttcaacaaattagcctacgctatcggcgatggcacgaccccagcgggtaatacgcatattgtgtgccttgggggggcccataatcatatccagccggaagaggacgtggaagcaacgaagatggccgttgaaaacatgtcgcctgggaatatggatatcaaacgtctggtcttccacaactggtgcaaggatgaatttgccaaaggcgcgtggttcttcgcccctccacagctgctgtcaaagagcctggatgaactgcgctgccgtcacggtaatgtcctgtttgcaaactccgattgggccttaggttggcgtggttttatcgatggtgctatcgaggagggccttcgcgcagcggttactgtaattgaggaactgcgtcctgcgcctgcggtgcgttcccacctg

SEQ ID NO: 316 - protein, 495 aa, synthetic construct
  REGION 1..495: note = Variant of monoamine oxidase
MTSRDGYQWTPETGLTQGVPSLGVISPPTNIEDTDKDGPWDVIVIGGGYCGLTATRDLTVAGFKTLLLEARDRIGGRSWSSNIDGYPYEMGGTWVHWHQSHVWREITRYKMHNALSPSFNFSRGVNHFQLRTNPTTSTYMTHEAEDELLRSALHKFTNVDGTNGRTVLPFPHDMFYVPEFRKYDEMSYSERIDQIRDELSLNERSSLEAFILLCSGGTLENSSFGEFLHWWAMSGYTYQGCMDCLISYKFKDGQSAFARRFWEEAAGTGRLGYVFGCPVRSVVNERDAVRVTARDGREFAAKRLVCTIPLNVLSSVHFSPPLSPQRMAAANIGHVNQCVKVHAEVSCPDMRSWSGISYPFNKLAYAIGDGTTPAGNTHIVCLGGAHNHIQPEEDVEATKMAVENMSPGNMDIKRLVFHNWCKDEFAKGAWFFAPPQLLSKSLDELRCRHGNVLFANSDWALGWRGFIDGAIEEGLRAAVTVIEELRPAPAVRSHL

SEQ ID NO: 317 - DNA, 1485 bp, synthetic construct
  misc_feature 1..1485: note = Variant of monoamine oxidase
  source 1..1485: mol_type = other DNA
atgaccagccgcgacggctatcagtggaccccggaaacgggtctgacccagggcgtaccgtccctgggtgtcatttcgccgccgactaacatcgaagataccgataaggacgggccttgggatgtcattgtcattgggggcgggtattgtgggctgaccgcaacccgtgatttaaccgtcgcagggttcaagacgctgctgctggaggcccgtgatcgtattggtggccgctcctggagcagtaatattgacggttacccgtatgagatgggtggcacttgggttcattggcatcaatctcacgtgtggcgtgaaatcacgcgttataaaatgcacaacgcgctgtctccatcatttaacttttcacgtggcgtgaatcacttccaactgcgtaccaatccgaccaccagtacgtacatgacgcacgaagcggaggatgaactgctgcgtagcgcattgcataaattcaccaatgtcgacggcactaatggccgtacagtgttgccgttcccacatgatatgttttatgtgccggaatttcgcaagtatgacgaaatgtcatattccgaacgcattgaccagatccgcgacgaactgtctttgaacgaacgctctagtttagaggctttcattttattatgtagcggtggcaccctggaaaactccagctttggtgaatttctgcattggtgggcaatgtcgggttacacgtatcagggctgtatggattgtttaatctcctataaatttaaggatggccagagtgcgttcgcgcgtcgcttctgggaagaagccgctggcactggccgtctgggctatgtctttggttgtccggtgcgttctgtggtgaacgaacgcgacgcagtacgtgttaccgcacgtgacggtcgcgaattcgcagcgaaacgtttggtttgcacgattccgctgaacgtattgagttctgttcattttagcccaccactgtccccgcaacgcatggccgctgcgaacattggccatgttaaccagtgcgtcaaagtgcatgcggaagtcagttgtccggatatgcgttcatggtcgggtatctcctatccgttcaacaaattagcctacgggatcggcgatggcacgaccccagcgggtaatacgcatattgtgtgccttgggggggcccataatcatatccagccggaagaggacgtggaagcaacgaagatggccgttgaaaacatgtcgcctgggaatatggatatcaaacgtctggtcttccacaactggtgcaaggatgaatttgccaaaggcgcgtggttcttcgcccctccacagctgctgtcaaagagcctggatgaactgcgctgccgtcacggtaatgtcctgtttgcaaactccgattgggccttaggttggcgtggttttatcgatggtgctatcgaggagggcacccgcgcagcggttactgtaattgaggaactgcgtcctgcgcctgcggtgcgttcccacctg

SEQ ID NO: 318 - protein, 495 aa, synthetic construct
  REGION 1..495: note = Variant of monoamine oxidase
MTSRDGYQWTPETGLTQGVPSLGVISPPTNIEDTDKDGPWDVIVIGGGYCGLTATRDLTVAGFKTLLLEARDRIGGRSWSSNIDGYPYEMGGTWVHWHQSHVWREITRYKMHNALSPSFNFSRGVNHFQLRTNPTTSTYMTHEAEDELLRSALHKFTNVDGTNGRTVLPFPHDMFYVPEFRKYDEMSYSERIDQIRDELSLNERSSLEAFILLCSGGTLENSSFGEFLHWWAMSGYTYQGCMDCLISYKFKDGQSAFARRFWEEAAGTGRLGYVFGCPVRSVVNERDAVRVTARDGREFAAKRLVCTIPLNVLSSVHFSPPLSPQRMAAANIGHVNQCVKVHAEVSCPDMRSWSGISYPFNKLAYGIGDGTTPAGNTHIVCLGGAHNHIQPEEDVEATKMAVENMSPGNMDIKRLVFHNWCKDEFAKGAWFFAPPQLLSKSLDELRCRHGNVLFANSDWALGWRGFIDGAIEEGTRAAVTVIEELRPAPAVRSHL

SEQ ID NO: 319 - DNA, 1485 bp, synthetic construct
  misc_feature 1..1485: note = Variant of monoamine oxidase
  source 1..1485: mol_type = other DNA
atgaccagccgcgacggctatcagtggaccccggaaacgggtctgacccagggcgtaccgtccctgggtgtcatttcgccgccgactaacatcgaagataccgataaggacgggccttgggatgtcattgtcattgggggggggtattgtgggctgaccgcaacccgtgatttaaccgtcgcagggttcaagacgctgctgctggaggcccgtgatcgtattggtggccgctcctggagcagtaatattgacggttacccgtatgagatgggtggcacttgggttcattggcatcaaccgcacgtgtggcgtgaaatcacgcgttataaaatgcacaacgcgctgtctccatcatttaacttttcacgtggcgtgaatcacttccaactgcgtaccaatccgaccaccagtacgtacatgacgcacgaagaggaggatgaactgctgcgtagcgcattgcataaattcaccaatgtcgacggcactaatggccgtacagtgttgccgttcccacatgatatgttttatgtgccggaatttcgcaagtatgacgaaatgtcatattccgaacgcattgaccagatccgcgacgaactgagcctgaacgaacgctctagtttagaggctttcattttattatgtagcggtggcaccctggaaaactccagctttggtgaatttctgcattggtgggcaatgtcgggttacacgtatcagggctgtatggattgtttaatctcctataaatttaaggatggccagagtgcgttcgcgcgtcgcttctgggaagaagccgctggcactggccgtctgggctatgtctttggttgtccggtgcgttctgtggtgaacgaacgcgacgcagtacgtgttaccgcacgtgacggtcgcgaattcgcagcgaaacgtttggtttgcacgattccgctgaacgtattgagttctgttcattttagcccaccactgtccccgcaacgcatggccgctgcgaacattggccatgttaaccagtgcgtcaaagtgcatgcggaagtcagttgtccggatatgcgttcatggtcgggtatttcctatccgttcaacaaattagcctacgctatcggcgatggcacgaccccagcgggtaatacgcatattgtgtgccttgggggggcccataatcatatccagccggaagaggacgtggaagcaacgaagatggccgttgaaaacatgtcgcctgggaatatggatatcaaacgtctggtcttccacaactggtgcaaggatgaatttgccaaaggcgcgtggttcttcgcccctccacagctgctgtcaaagagcctggatgaactgcgcgcacgtcacggtaatgtcctgtttgcaaactccgattgggccttaggttggcgtggttttatcgatggtgctatcgaggagggcacccgcgcagcggttactgtaattgaggaactgcgtcctgcgcctgcggtgcgttcccacctg

SEQ ID NO: 320 - protein, 495 aa, synthetic construct
  REGION 1..495: note = Variant of monoamine oxidase
MTSRDGYQWTPETGLTQGVPSLGVISPPTNIEDTDKDGPWDVIVIGGGYCGLTATRDLTVAGFKTLLLEARDRIGGRSWSSNIDGYPYEMGGTWVHWHQPHVWREITRYKMHNALSPSFNFSRGVNHFQLRTNPTTSTYMTHEEEDELLRSALHKFTNVDGTNGRTVLPFPHDMFYVPEFRKYDEMSYSERIDQIRDELSLNERSSLEAFILLCSGGTLENSSFGEFLHWWAMSGYTYQGCMDCLISYKFKDGQSAFARRFWEEAAGTGRLGYVFGCPVRSVVNERDAVRVTARDGREFAAKRLVCTIPLNVLSSVHFSPPLSPQRMAAANIGHVNQCVKVHAEVSCPDMRSWSGISYPFNKLAYAIGDGTTPAGNTHIVCLGGAHNHIQPEEDVEATKMAVENMSPGNMDIKRLVFHNWCKDEFAKGAWFFAPPQLLSKSLDELRARHGNVLFANSDWALGWRGFIDGAIEEGTRAAVTVIEELRPAPAVRSHL

SEQ ID NO: 321 - DNA, 1485 bp, synthetic construct
  misc_feature 1..1485: note = Variant of monoamine oxidase
  source 1..1485: mol_type = other DNA
atgaccagccgcgacggctatcagtggaccccggaaacgggtctgacccagggcgtaccgtccctgggtgtcatttcgccgccgactaacatcgaagataccgataaggacgggccttgggatgtcattgtcattgggggcgggtattgtgggctgaccgcaacccgtgatttaaccgtcgcagggttcaagacgctgctgctggaggcccgtgatcgtattggtggccgctcctggagcagtaatattgacggttacccgtatgagatgggtggcacttgggttcattggcatcaatctcacgtgtggcgtgaaatcacgcgttataaaatgcacaacgcgctgtctccatcatttaacttttcacgtggcgtgaatcacttccaactgcgtaccaatccgaccaccagtacgtacatgacgcacgaagcggaggatgaactgctgcgtagcgcattgcataaattcaccaatgtcgacggcactaatggccgtacagtgttgccgttcccacatgatatgttttatgtgccggaatttcgcaagtatgacgaaatgtcatattccgaacgcattgaccagatccgcgacgaactgtctttgaacgaacgctctagtttagaggctttcattttattatgtagcggtggcaccctggaaaactccagctttggtgaatttctgcattggtgggcaatgtcgggttacacgtatcagggctgtatggattgtttaatctcctataaatttaaggatggccagagtgcgttcgcgcgtcgcttctgggaagaagccgctggcactggccgtctgggctatgtctttggttgtccggtgcgttctgtggtgaacgaacgcgacgcagtacgtgttaccgcacgtgacggtcgcgaattcgcagcgaaacgtttggtttgcacgattccgctgaacgtattgagttctgttcattttagcccaccactgtccccgcaacgcatggccgctgcgaacattggccatgttaaccagtgcgtcaaagtgcatgcggaagtcagttgtccggatatgcgttcatggtcgggtatctcctatccgttcaacaaattagcctacgctatcggcgatggcacgaccccagcgggtaatacgcatattgtgtgccttgggggggcccataatcatatccagccggaagaggacgtggaagcaacgaagatggccgttgaaaacatgtcgcctgggaatatggatatcaaacgtctggtcttccacaactggtgcaaggatgaatttgccaaaggcgcgtggttcttcgcccctccacagctgctgtcaaagagcctggatgaactgcgctgccgtcacggtaatatgctgtttgcaaactccgattgggccttaggttggcgtggttttatcgatggtgctatcgaggagggcacccgcgcagcggttactgtaattgaggaactgcgtcctgcgcctgcggtgcgttcccacctg

SEQ ID NO: 322 - protein, 495 aa, synthetic construct
  REGION 1..495: note = Variant of monoamine oxidase
MTSRDGYQWTPETGLTQGVPSLGVISPPTNIEDTDKDGPWDVIVIGGGYCGLTATRDLTVAGFKTLLLEARDRIGGRSWSSNIDGYPYEMGGTWVHWHQSHVWREITRYKMHNALSPSFNFSRGVNHFQLRTNPTTSTYMTHEAEDELLRSALHKFTNVDGTNGRTVLPFPHDMFYVPEFRKYDEMSYSERIDQIRDELSLNERSSLEAFILLCSGGTLENSSFGEFLHWWAMSGYTYQGCMDCLISYKFKDGQSAFARRFWEEAAGTGRLGYVFGCPVRSVVNERDAVRVTARDGREFAAKRLVCTIPLNVLSSVHFSPPLSPQRMAAANIGHVNQCVKVHAEVSCPDMRSWSGISYPFNKLAYAIGDGTTPAGNTHIVCLGGAHNHIQPEEDVEATKMAVENMSPGNMDIKRLVFHNWCKDEFAKGAWFFAPPQLLSKSLDELRCRHGNMLFANSDWALGWRGFIDGAIEEGTRAAVTVIEELRPAPAVRSHL

SEQ ID NO: 323 - DNA, 1485 bp, synthetic construct
  misc_feature 1..1485: note = Variant of monoamine oxidase
  source 1..1485: mol_type = other DNA
atgaccagccgcgacggctatcagtggaccccggaaacgggtctgacccagggcgtaccgtccctgggtgtcatttcgccgccgactaacatcgaagataccgataaggacgggccttgggatgtcattgtcattgggggcgggtattgtgggctgaccgcaacccgtgatttaaccgtcgcagggttcaagacgctgctgctggaggcccgtgatcgtattggtggccgctcctggagcagtaatattgacggttacccgtatgagatgggtggcacttgggttcattggcatcaatctcacgtgtggcgtgaaatcacgcgttataaaatgcacaacgcgctgtctccatcatttaacttttcacgtggcgtgaatcacttccaactgcgtaccaatccgaccaggagtacgtacatgacgcacgaagcggaggatgaactgctgcgtagcgcattgcataaattcaccaatgtcgacggcactaatggccgtacagtgttgccgttcccacatgatatgttttatgtgccggaatttcgcaagtatgacgaaatgtcatattccgaacgcattgaccagatccgcgacgaactgtctttgaacgaacgctctagtttagaggctttcattttattatgtagcggtggcaccctggaaaactccagctttggtgaatttctgcattggtgggcaatgtcgggttacacgtatcagggctgtatggattgtttaatctcctataaatttaaggatggccagagtgcgttcgcgcgtcgcttctgggaagaagccgctggcactggccgtctgggctatgtctttggttgtccggtgcgttctgtggtgaacgaacgcgacgcagtacgtgttaccgcacgtgacggtcgcgaattcgcagcgaaacgtttggtttgcacgattccgctgaacgtattgagttctgttcattttagcccaccactgtccccgcaacgcatggccgctgcgaacattggccatgttaaccagtgcgtcaaagtgcatgcggaagtcagttgtccggatatgcgttcatggtcgggtatctcctatccgttcaacaaattagcctacgctatcggcgatggcacgaccccagcgggtaatacgcatattgtgtgccttgggggggcccataatcatatccagccggaagaggacgtggaagcaacgaagatggccgttgaaaacatgtcgcctgggaatatggatatcaaacgtctggtcttccacaactggtgcaaggatgaatttgccaaaggcgcgtggttcttcgcccctccacagctgctgtcaaagagcctggatgaactgcgctgccgtcacggtaatgtcctgtttgcaaactccgattgggccttaggttggcgtggttttatcgatggtgctatcgaggagggcacccgcgcagcggttactgtaattgaggaactgcgtcctgcgcctgcggtgcgttcccacctg

SEQ ID NO: 324 - protein, 495 aa, synthetic construct
  REGION 1..495: note = Variant of monoamine oxidase
MTSRDGYQWTPETGLTQGVPSLGVISPPTNIEDTDKDGPWDVIVIGGGYCGLTATRDLTVAGFKTLLLEARDRIGGRSWSSNIDGYPYEMGGTWVHWHQSHVWREITRYKMHNALSPSFNFSRGVNHFQLRTNPTRSTYMTHEAEDELLRSALHKFTNVDGTNGRTVLPFPHDMFYVPEFRKYDEMSYSERIDQIRDELSLNERSSLEAFILLCSGGTLENSSFGEFLHWWAMSGYTYQGCMDCLISYKFKDGQSAFARRFWEEAAGTGRLGYVFGCPVRSVVNERDAVRVTARDGREFAAKRLVCTIPLNVLSSVHFSPPLSPQRMAAANIGHVNQCVKVHAEVSCPDMRSWSGISYPFNKLAYAIGDGTTPAGNTHIVCLGGAHNHIQPEEDVEATKMAVENMSPGNMDIKRLVFHNWCKDEFAKGAWFFAPPQLLSKSLDELRCRHGNVLFANSDWALGWRGFIDGAIEEGTRAAVTVIEELRPAPAVRSHL

SEQ ID NO: 325 - DNA, 1485 bp, synthetic construct
  misc_feature 1..1485: note = Variant of monoamine oxidase
  source 1..1485: mol_type = other DNA
atgaccagccgcgacggctatcagtggaccccggaaacgggtctgacccagggcgtaccgtccctgggtgtcatttcgccgccgactaacatcgaagataccgataaggacgggccttgggatgtcattgtcattgggggcgggtattgtgggctgaccgcaacccgtgatttaaccgtcgcagggttcaagacgctgctgctggaggcccgtgatcgtattggtggccgctcctggagcagtaatattgacggttacccgtatgagatgggtggcacttgggttcattggcatcaatctcacgtgtggcgtgaaatcacgcgttataaaatgcacaacgcgctgtctagttcatttaacttttcacgtggcgtgaatcacttccaactgcgtaccaatccgaccaccagtacgtacatgacgcacgaagcggaggatgaactgctgcgtagcgcattgcataaattcaccaatgtcgacggcactaatggccgtacagtgttgccgttcccacatgatatgttttatgtgccggaatttcgcaagtatgacgaaatgtcatattccgaacgcattgaccagatccgcgacgaactgtctttgaacgaacgctctagtttagaggctttcattttattatgtagcggtggcaccctggaaaactccagctttggtgaatttctgcattggtgggcaatgtcgggttacacgtatcagggctgtatggattgtttaatctcctataaatttaaggatggccagagtgcgttcgcgcgtcgcttctgggaagaagccgctggcactggccgtctgggctatgtctttggttgtccggtgcgttctgtggtgaacgaacgcgacgcagtacgtgttaccgcacgtgacggtcgcgaattcgcagcgaaacgtttggtttgcacgattccgctgaacgtattgagttctgttcattttagcccaccactgtccccgcaacgcatggccgctgcgaacattggccatgttaaccagtgcgtcaaagtgcatgcggaagtcagttgtccggatatgcgttcatggtcgggtatctcctatccgttcaacaaattagcctacgctatcggcgatggcacgaccccagcgggtaatacgcatattgtgtgccttgggggggcccataatcatatccagccggaagaggacgtggaagcaacgaagatggccgttgaaaacatgtcgcctgggaatatggatatcaaacgtctggtcttccacaactggtgcaaggatgaatttgccaaaggcgcgtggttcttcgcccctccacagctgctgtcaaagagcctggatgaactgcgctgccgtcacggtaatgtcctgtttgcaaactccgattgggccttaggttggcgtggttttatcgatggtgctatcgaggagggcacccgcgcagcggttactgtaattgaggaactgcgtcctgcgcctgcggtgcgttcccacctg

SEQ ID NO: 326 - protein, 495 aa, synthetic construct
  REGION 1..495: note = Variant of monoamine oxidase
MTSRDGYQWTPETGLTQGVPSLGVISPPTNIEDTDKDGPWDVIVIGGGYCGLTATRDLTVAGFKTLLLEARDRIGGRSWSSNIDGYPYEMGGTWVHWHQSHVWREITRYKMHNALSSSFNFSRGVNHFQLRTNPTTSTYMTHEAEDELLRSALHKFTNVDGTNGRTVLPFPHDMFYVPEFRKYDEMSYSERIDQIRDELSLNERSSLEAFILLCSGGTLENSSFGEFLHWWAMSGYTYQGCMDCLISYKFKDGQSAFARRFWEEAAGTGRLGYVFGCPVRSVVNERDAVRVTARDGREFAAKRLVCTIPLNVLSSVHFSPPLSPQRMAAANIGHVNQCVKVHAEVSCPDMRSWSGISYPFNKLAYAIGDGTTPAGNTHIVCLGGAHNHIQPEEDVEATKMAVENMSPGNMDIKRLVFHNWCKDEFAKGAWFFAPPQLLSKSLDELRCRHGNVLFANSDWALGWRGFIDGAIEEGTRAAVTVIEELRPAPAVRSHL

SEQ ID NO: 327 - DNA, 1485 bp, synthetic construct
  misc_feature 1..1485: note = Variant of monoamine oxidase
  source 1..1485: mol_type = other DNA
atgaccagccgcgacggctatcagtggaccccggaaacgggtctgacccagggcgtaccgtccctgggtgtcatttcgccgccgactaacatcgaagataccgataaggacgggccttgggatgtcattgtcattgggggcgggtattgtgggctgaccgcaacccgtgatttaaccgtcgcagggttcaagacgctgctgctggaggcccgtgatcgtattggtggccgctcctggagcagtaatattgacggttacccgtatgagatgggtggcacttgggttcattggcatcaatctcacgtgtggcgtgaaatcacgcgttataaaatgcacaacgcgctgtctttgtcatttaacttttcacgtggcgtgaatcacttccaactgcgtaccaatccgaccaccagtacgtacatgacgcacgaagcggaggatgaactgctgcgtagcgcattgcataaattcaccaatgtcgacggcactaatggccgtacagtgttgccgttcccacatgatatgttttatgtgccggaatttcgcaagtatgacgaaatgtcatattccgaacgcattgaccagatccgcgacgaactgtctttgaacgaacgctctagtttagaggctttcattttattatgtagcggtggcaccctggaaaactccagctttggtgaatttctgcattggtgggcaatgtcgggttacacgtatcagggctgtatggattgtttaatctcctataaatttaaggatggccagagtgcgttcgcgcgtcgcttctgggaagaagccgctggcactggccgtctgggctatgtctttggttgtccggtgcgttctgtggtgaacgaacgcgacgcagtacgtgttaccgcacgtgacggtcgcgaattcgcagcgaaacgtttggtttgcacgattccgctgaacgtattgagttctgttcattttagcccaccactgtccccgcaacgcatggccgctgcgaacattggccatgttaaccagtgcgtcaaagtgcatgcggaagtcagttgtccggatatgcgttcatggtcgggtatctcctatccgttcaacaaattagcctacgctatcggcgatggcacgaccccagcgggtaatacgcatattgtgtgccttgggggggcccataatcatatccagccggaagaggacgtggaagcaacgaagatggccgttgaaaacatgtcgcctgggaatatggatatcaaacgtctggtcttccacaactggtgcaaggatgaatttgccaaaggcgcgtggttcttcgcccctccacagctgctgtcaaagagcctggatgaactgcgctgccgtcacggtaatgtcctgtttgcaaactccgattgggccttaggttggcgtggttttatcgatggtgctatcgaggagggcacccgcgcagcggttactgtaattgaggaactgcgtcctgcgcctgcggtgcgttcccacctg

SEQ ID NO: 328 - protein, 495 aa, synthetic construct
  REGION 1..495: note = Variant of monoamine oxidase
MTSRDGYQWTPETGLTQGVPSLGVISPPTNIEDTDKDGPWDVIVIGGGYCGLTATRDLTVAGFKTLLLEARDRIGGRSWSSNIDGYPYEMGGTWVHWHQSHVWREITRYKMHNALSLSFNFSRGVNHFQLRTNPTTSTYMTHEAEDELLRSALHKFTNVDGTNGRTVLPFPHDMFYVPEFRKYDEMSYSERIDQIRDELSLNERSSLEAFILLCSGGTLENSSFGEFLHWWAMSGYTYQGCMDCLISYKFKDGQSAFARRFWEEAAGTGRLGYVFGCPVRSVVNERDAVRVTARDGREFAAKRLVCTIPLNVLSSVHFSPPLSPQRMAAANIGHVNQCVKVHAEVSCPDMRSWSGISYPFNKLAYAIGDGTTPAGNTHIVCLGGAHNHIQPEEDVEATKMAVENMSPGNMDIKRLVFHNWCKDEFAKGAWFFAPPQLLSKSLDELRCRHGNVLFANSDWALGWRGFIDGAIEEGTRAAVTVIEELRPAPAVRSHL

SEQ ID NO: 329 - DNA, 1485 bp, synthetic construct
  misc_feature 1..1485: note = Variant of monoamine oxidase
  source 1..1485: mol_type = other DNA
atgaccagccgcgacggctatcagtggaccccggaaacgggtctgacccagggcgtaccgtccctgggtgtcatttcgccgccgactaacatcgaagataccgataaggacgggccttgggatgtcattgtcattgggggcgggtattgtgggctgaccgcaacccgtgatttaaccgtcgcagggttcaagacgctgctgctggaggcccgtgatcgtattggtggccgctcctggagcagtaatattgacggttacccgtatgagatgggtggcacttgggttcattggcatcaatctcacgtgtggcgtgaaatcacgcgttataaaatgcacaacgcgctgtctccatcatttaacttttcacgtggcgtgaatcacttccaactgcgtaccaatccgaccaccagtacgtacatgacgcacgaagcggaggatgaactgctgcgtagcgcattgcataaattcaccaatgtcgacggcactaatggccgtacagtgttgccgttcccacatgatatgttttatgtgccggaatttctgaagtatgacgaaatgtcatattccgaacgcattgaccagatccgcgacgaactgtctttgaacgaacgctctagtttagaggctttcattttattatgtagcggtggcaccctggaaaactccagctttggtgaatttctgcattggtgggcaatgtcgggttacacgtatcagggctgtatggattgtttaatctcctataaatttaaggatggccagagtgcgttcgcgcgtcgcttctgggaagaagccgctggcactggccgtctgggctatgtctttggttgtccggtgcgttctgtggtgaacgaacgcgacgcagtacgtgttaccgcacgtgacggtcgcgaattcgcagcgaaacgtttggtttgcacgattccgctgaacgtattgagttctgttcattttagcccaccactgtccccgcaacgcatggccgctgcgaacattggccatgttaaccagtgcgtcaaagtgcatgcggaagtcagttgtccggatatgcgttcatggtcgggtatctcctatccgttcaacaaattagcctacgctatcggcgatggcacgaccccagcgggtaatacgcatattgtgtgccttgggggggcccataatcatatccagccggaagaggacgtggaagcaacgaagatggccgttgaaaacatgtcgcctgggaatatggatatcaaacgtctggtcttccacaactggtgcaaggatgaatttgccaaaggcgcgtggttcttcgcccctccacagctgctgtcaaagagcctggatgaactgcgctgccgtcacggtaatgtcctgtttgcaaactccgattgggccttaggttggcgtggttttatcgatggtgctatcgaggagggcacccgcgcagcggttactgtaattgaggaactgcgtcctgcgcctgcggtgcgttcccacctg

SEQ ID NO: 330 - protein, 495 aa, synthetic construct
  REGION 1..495: note = Variant of monoamine oxidase
MTSRDGYQWTPETGLTQGVPSLGVISPPTNIEDTDKDGPWDVIVIGGGYCGLTATRDLTVAGFKTLLLEARDRIGGRSWSSNIDGYPYEMGGTWVHWHQSHVWREITRYKMHNALSPSFNFSRGVNHFQLRTNPTTSTYMTHEAEDELLRSALHKFTNVDGTNGRTVLPFPHDMFYVPEFLKYDEMSYSERIDQIRDELSLNERSSLEAFILLCSGGTLENSSFGEFLHWWAMSGYTYQGCMDCLISYKFKDGQSAFARRFWEEAAGTGRLGYVFGCPVRSVVNERDAVRVTARDGREFAAKRLVCTIPLNVLSSVHFSPPLSPQRMAAANIGHVNQCVKVHAEVSCPDMRSWSGISYPFNKLAYAIGDGTTPAGNTHIVCLGGAHNHIQPEEDVEATKMAVENMSPGNMDIKRLVFHNWCKDEFAKGAWFFAPPQLLSKSLDELRCRHGNVLFANSDWALGWRGFIDGAIEEGTRAAVTVIEELRPAPAVRSHL

SEQ ID NO: 331 - DNA, 1485 bp, synthetic construct
  misc_feature 1..1485: note = Variant of monoamine oxidase
  source 1..1485: mol_type = other DNA
atgaccagccgcgacggctatcagtggaccccggaaacgggtctgacccagggcgtaccgtccctgggtgtcatttcgccgccgactaacatcgaagataccgataaggacgggccttgggatgtcattgtcattgggggcgggtattgtgggctgaccgcaacccgtgatttaaccgtcgcagggttcaagacgctgctgctggaggcccgtgatcgtattggtggccgctcctggagcagtaatattgacggttacccgtatgagatgggtggcacttgggttcattggcatcaatctcacgtgtggcgtgaaatcacgcgttataaaatgcacaacgcgctgtctccatcatttaacttttcacgtggcgtgaatcacttccaactgcgtaccaatccgaccaccagtacgtacatgacgcacgaagcggaggatgaactgctgcgtagcgcattgcataaattcaccaatgtcgacggcactaatggccgtacagtgttgggtttcccacatgatatgttttatgtgccggaatttcgcaagtatgacgaaatgtcatattccgaacgcattgaccagatccgcgacgaactgtctttgaacgaacgctctagtttagaggctttcattttattatgtagcggtggcaccctggaaaactccagctttggtgaatttctgcattggtgggcaatgtcgggttacacgtatcagggctgtatggattgtttaatctcctataaatttaaggatggccagagtgcgttcgcgcgtcgcttctgggaagaagccgctggcactggccgtctgggctatgtctttggttgtccggtgcgttctgtggtgaacgaacgcgacgcagtacgtgttaccgcacgtgacggtcgcgaattcgcagcgaaacgtttggtttgcacgattccgctgaacgtattgagttctgttcattttagcccaccactgtccccgcaacgcatggccgctgcgaacattggccatgttaaccagtgcgtcaaagtgcatgcggaagtcagttgtccggatatgcgttcatggtcgggtatctcctatccgttcaacaaattagcctacgctatcggcgatggcacgaccccagcgggtaatacgcatattgtgtgccttgggggggcccataatcatatccagccggaagaggacgtggaagcaacgaagatggccgttgaaaacatgtcgcctgggaatatggatatcaaacgtctggtcttccacaactggtgcaaggatgaatttgccaaaggcgcgtggttcttcgcccctccacagctgctgtcaaagagcctggatgaactgcgctgccgtcacggtaatgtcctgtttgcaaactccgattgggccttaggttggcgtggttttatcgatggtgctatcgaggagggcacccgcgcagcggttactgtaattgaggaactgcgtcctgcgcctgcggtgcgttcccacctg

SEQ ID NO: 332 - protein, 495 aa, synthetic construct
  REGION 1..495: note = Variant of monoamine oxidase
MTSRDGYQWTPETGLTQGVPSLGVISPPTNIEDTDKDGPWDVIVIGGGYCGLTATRDLTVAGFKTLLLEARDRIGGRSWSSNIDGYPYEMGGTWVHWHQSHVWREITRYKMHNALSPSFNFSRGVNHFQLRTNPTTSTYMTHEAEDELLRSALHKFTNVDGTNGRTVLGFPHDMFYVPEFRKYDEMSYSERIDQIRDELSLNERSSLEAFILLCSGGTLENSSFGEFLHWWAMSGYTYQGCMDCLISYKFKDGQSAFARRFWEEAAGTGRLGYVFGCPVRSVVNERDAVRVTARDGREFAAKRLVCTIPLNVLSSVHFSPPLSPQRMAAANIGHVNQCVKVHAEVSCPDMRSWSGISYPFNKLAYAIGDGTTPAGNTHIVCLGGAHNHIQPEEDVEATKMAVENMSPGNMDIKRLVFHNWCKDEFAKGAWFFAPPQLLSKSLDELRCRHGNVLFANSDWALGWRGFIDGAIEEGTRAAVTVIEELRPAPAVRSHL

SEQ ID NO: 333 - DNA, 1485 bp, synthetic construct
  misc_feature 1..1485: note = Variant of monoamine oxidase
  source 1..1485: mol_type = other DNA
atgaccagccgcgacggctatcagtggaccccggaaacgggtctgacccagggcgtaccgtccctgggtgtcatttcgccgccgactaacatcgaagataccgataaggacgggccttgggatgtcattgtcattgggggcgggtattgtgggctgaccgcaacccgtgatttaaccgtcgcagggttcaagacgctgctgctggaggcccgtgatcgtattggtggccgctcctggagcagtaatattgacggttacccgtatgagatgggtggcacttgggttcattggcatcaatctcacgtgtggcgtgaaatcacgcgttataaaatgcacaacgcgctgtctccatcatttaacttttcacgtggcgtgaatcacttccaactgcgtaccaatccgaccaccagtacgtacatgacgcacgaagcggaggatgaactgctgcgtagcgcattgcataaattcaccaatgtcgacggcactaatggccgtacagtgttgccgttcccacatgatatgttttattggccggaatttcgcaagtatgacgaaatgtcatattccgaacgcattgaccagatccgcgacgaactgtctttgaacgaacgctctagtttagaggctttcattttattatgtagcggtggcaccctggaaaactccagctttggtgaatttctgcattggtgggcaatgtcgggttacacgtatcagggctgtatggattgtttaatctcctataaatttaaggatggccagagtgcgttcgcgcgtcgcttctgggaagaagccgctggcactggccgtctgggctatgtctttggttgtccggtgcgttctgtggtgaacgaacgcgacgcagtacgtgttaccgcacgtgacggtcgcgaattcgcagcgaaacgtttggtttgcacgattccgctgaacgtattgagttctgttcattttagcccaccactgtccccgcaacgcatggccgctgcgaacattggccatgttaaccagtgcgtcaaagtgcatgcggaagtcagttgtccggatatgcgttcatggtcgggtatctcctatccgttcaacaaattagcctacgctatcggcgatggcacgaccccagcgggtaatacgcatattgtgtgccttgggggggcccataatcatatccagccggaagaggacgtggaagcaacgaagatggccgttgaaaacatgtcgcctgggaatatggatatcaaacgtctggtcttccacaactggtgcaaggatgaatttgccaaaggcgcgtggttcttcgcccctccacagctgctgtcaaagagcctggatgaactgcgctgccgtcacggtaatgtcctgtttgcaaactccgattgggccttaggttggcgtggttttatcgatggtgctatcgaggagggcacccgcgcagcggttactgtaattgaggaactgcgtcctgcgcctgcggtgcgttcccacctg

SEQ ID NO: 334 - protein, 495 aa, synthetic construct
  REGION 1..495: note = Variant of monoamine oxidase
MTSRDGYQWTPETGLTQGVPSLGVISPPTNIEDTDKDGPWDVIVIGGGYCGLTATRDLTVAGFKTLLLEARDRIGGRSWSSNIDGYPYEMGGTWVHWHQSHVWREITRYKMHNALSPSFNFSRGVNHFQLRTNPTTSTYMTHEAEDELLRSALHKFTNVDGTNGRTVLPFPHDMFYWPEFRKYDEMSYSERIDQIRDELSLNERSSLEAFILLCSGGTLENSSFGEFLHWWAMSGYTYQGCMDCLISYKFKDGQSAFARRFWEEAAGTGRLGYVFGCPVRSVVNERDAVRVTARDGREFAAKRLVCTIPLNVLSSVHFSPPLSPQRMAAANIGHVNQCVKVHAEVSCPDMRSWSGISYPFNKLAYAIGDGTTPAGNTHIVCLGGAHNHIQPEEDVEATKMAVENMSPGNMDIKRLVFHNWCKDEFAKGAWFFAPPQLLSKSLDELRCRHGNVLFANSDWALGWRGFIDGAIEEGTRAAVTVIEELRPAPAVRSHL

SEQ ID NO: 335 - DNA, 1485 bp, synthetic construct
  misc_feature 1..1485: note = Variant of monoamine oxidase
  source 1..1485: mol_type = other DNA
atgaccagccgcgacggctatcagtggaccccggaaacgggtctgacccagggcgtaccgtccctgggtgtcatttcgccgccgactaacatcgaagataccgataaggacgggccttgggatgtcattgtcattgggggcgggtattgtgggctgaccgcaacccgtgatttaaccgtcgcagggttcaagacgctgctgctggaggcccgtgatcgtattggtggccgctcctggagcagtaatattgacggttacccgtatgagatgggtggcacttgggttcattggcatcaatctcacgtgtggcgtgaaatcacgcgttataaaatgcacaacgcgctgtctccatcatttaacttttcacgtggcgtgaatcacttccaactgcgtaccaatccgaccaccagtacgtacatgacgcacgaagcggaggatgaactgctgcgtagcgcattgcataaattcaccaatgtcgacggcactaatggccgtacagtgttgccgttcccacatgatatgttttatgtgccggaatttcgcaagtatgacgaaatgtcatattccgaacgcattgaccagatccgcgacgaactgtctttgaacgaacgctctagtttagaggctttcattttattatgtagcggtggcaccctggaaaactccagctttggtgaatttctgcattggtgggcaatgtcgggttacacgtatcagggctgtatggattgtttaatctcctataaatttaaggatggccagagtgcgttcgcgcgtcgcttctgggaagaagccgctggcactggccgtctgggctatgtctttggttgtccggtgcgttctgtggtgaacgaacgcgacgcagtacgtgttaccgcacgtgacggtcgcgaattcgcagcgaaacgtttggtttgcacgattccgctgaacgtattgagttctgttcattttagcccaccactgtccccgcaacgcatggccgctgcgaacattggccatgttaaccagtgcgtcaaagtgcatgcggaagtcagttgtccggatatgcgttcatggtcgggtatctcctatccgttcaacaaattagcctacgctatcggcgatggcacgaccccagcgggtaatacgcatattgtgtgccttgggggggggcataatcatatccagccggaagaggacgtggaagcaacgaagatggccgttgaaaacatgtcgcctgggaatatggatatcaaacgtctggtcttccacaactggtgcaaggatgaatttgccaaaggcgcgtggttcttcgcccctccacagctgctgtcaaagagcctggatgaactgcgctgccgtcacggtaatgtcctgtttgcaaactccgattgggccttaggttggcgtggttttatcgatggtgctatcgaggagggcacccgcgcagcggttactgtaattgaggaactgcgtcctgcgcctgcggtgcgttcccacctg

SEQ ID NO: 336 - protein, 495 aa, synthetic construct
  REGION 1..495: note = Variant of monoamine oxidase
MTSRDGYQWTPETGLTQGVPSLGVISPPTNIEDTDKDGPWDVIVIGGGYCGLTATRDLTVAGFKTLLLEARDRIGGRSWSSNIDGYPYEMGGTWVHWHQSHVWREITRYKMHNALSPSFNFSRGVNHFQLRTNPTTSTYMTHEAEDELLRSALHKFTNVDGTNGRTVLPFPHDMFYVPEFRKYDEMSYSERIDQIRDELSLNERSSLEAFILLCSGGTLENSSFGEFLHWWAMSGYTYQGCMDCLISYKFKDGQSAFARRFWEEAAGTGRLGYVFGCPVRSVVNERDAVRVTARDGREFAAKRLVCTIPLNVLSSVHFSPPLSPQRMAAANIGHVNQCVKVHAEVSCPDMRSWSGISYPFNKLAYAIGDGTTPAGNTHIVCLGGGHNHIQPEEDVEATKMAVENMSPGNMDIKRLVFHNWCKDEFAKGAWFFAPPQLLSKSLDELRCRHGNVLFANSDWALGWRGFIDGAIEEGTRAAVTVIEELRPAPAVRSHL

SEQ ID NO: 337 - DNA, 1485 bp, synthetic construct
  misc_feature 1..1485: note = Variant of monoamine oxidase
  source 1..1485: mol_type = other DNA
atgaccagccgcgacggctatcagtggaccccggaaacgggtctgacccagggcgtaccgtccctgggtgtcatttcgccgccgactaacatcgaagataccgataaggacgggccttgggatgtcattgtcattgggggcgggtattgtgggctgaccgcaacccgtgatttaaccgtcgcagggttcaagacgctgctgctggaggcccgtgatcgtattggtggccgctcctggagcagtaatattgacggttacccgtatgagatgggtggcacttgggttcattggcatcaatctcacgtgtggcgtgaaatcacgcgttataaaatgcacaacgcgctgtctccatcatttaacttttcacgtggcgtgaatcacttccaactgcgtaccaatccgaccaccagtacgtacatgacgcacgaagcggaggatgaactgctgcgtagcgcattgcataaattcaccaatgtcgacggcactaatggccgtacagtgttgccgttcccacatgatatgttttatgtgccggaatttcgcaagtatgacgaaatgtcatattccgaacgcattgaccagatccgcgacgaactgtctttgaacgaacgctctagtttagaggctttcattttattatgtagcggtggcaccctggaaaactccagctttggtgaatttctgcattggtgggcaatgtcgggttacacgtatcagggctgtatggattgtttaatctcctataaatttaaggatggccagagtgcgttcgcgcgtcgcttctgggaagaagccgctggcactggccgtctgggctatgtctttggttgtccggtgcgttctgtggtgaacgaacgcgacgcagtacgtgttaccgcacgtgacggtcgcgaattcgcagcgaaacgtttggtttgcacgattccgctgaacgtattgagttctgttcattttagcccaccactgtccccgcaacgcatggccgctgcgaacattggccatgttaaccagtgcgtcaaagtgcatgcggaagtcagttgtccggatatgcgttcatggtcgggtatctcctatccgttcaacaaattagcctacgctatcggcgatggcacgaccccagcgggtaatacgcatattgtgtgccttgggggggcccataatcatatccagccggaagaggacgtggaagcaacgaagatggccgttgaaaacatgtcgcctgggaatatggatatcaaacgtctggtcttccacaactggtgcaaggatgaatttgccaaaggcgcgtggttcttcgcccctccacagctgctgtcaaagagcctggatgaagatcgctgccgtcacggtaatgtcctgtttgcaaactccgattgggccttaggttggcgtggttttatcgatggtgctatcgaggagggcacccgcgcagcggttactgtaattgaggaactgcgtcctgcgcctgcggtgcgttcccacctg

SEQ ID NO: 338 - protein, 495 aa, synthetic construct
  REGION 1..495: note = Variant of monoamine oxidase
MTSRDGYQWTPETGLTQGVPSLGVISPPTNIEDTDKDGPWDVIVIGGGYCGLTATRDLTVAGFKTLLLEARDRIGGRSWSSNIDGYPYEMGGTWVHWHQSHVWREITRYKMHNALSPSFNFSRGVNHFQLRTNPTTSTYMTHEAEDELLRSALHKFTNVDGTNGRTVLPFPHDMFYVPEFRKYDEMSYSERIDQIRDELSLNERSSLEAFILLCSGGTLENSSFGEFLHWWAMSGYTYQGCMDCLISYKFKDGQSAFARRFWEEAAGTGRLGYVFGCPVRSVVNERDAVRVTARDGREFAAKRLVCTIPLNVLSSVHFSPPLSPQRMAAANIGHVNQCVKVHAEVSCPDMRSWSGISYPFNKLAYAIGDGTTPAGNTHIVCLGGAHNHIQPEEDVEATKMAVENMSPGNMDIKRLVFHNWCKDEFAKGAWFFAPPQLLSKSLDEDRCRHGNVLFANSDWALGWRGFIDGAIEEGTRAAVTVIEELRPAPAVRSHL

SEQ ID NO: 339 - DNA, 1485 bp, synthetic construct
  misc_feature 1..1485: note = Variant of monoamine oxidase
  source 1..1485: mol_type = other DNA
atgaccagccgcgacggctatcagtggaccccggaaacgggtctgacccagggcgtaccgtccctgggtgtcatttcgccgccgactaacatcgaagataccgataaggacgggccttgggatgtcattgtcattgggggcgggtattgtgggctgaccgcaacccgtgatttaaccgtcgcagggttcaagacgctgctgctggaggcccgtgatcgtattggtggccgctcctggagcagtaatattgacggttacccgtatgagatgggtggcacttgggttcattggcatcaatctcacgtgtggcgtgaaatcacgcgttataaaatgcacaacgcgctgtctccatcatttaacttttcacgtggcgtgaatcacttccaactgcgtaccaatccgaccaccagtacgtacatgacgcacgaagcggaggatgaactgctgcgtagcgcattgcataaattcaccaatgtcgacggcactaatggccgtacagtgttgccgttcccacatgatatgttttatgtgccggaatttcgcaagtatgacgaaatgtcatattccgaacgcattgaccagatccgtgacgaactgtctttgaacgaacgctctagtttagaggctttcattttattatgtagcggtggcaccctggaaaactccagctttggtgaatttctgcattggtgggcaatgtcgggttacacgtatcagggctgtatggattgtttaatctcctataaatttaaggatggccagagtgcgttcgcgcgtcgcttctgggaagaagccgctggcactggccgtctgggctatgtctttggttgtccggtgcgttctgtggtgaacgaacgcgacgcagtatatgttaccgcacgtgacggtcgcgaattcgcagcgaaacgtttggtttgcacgattccgctgaacgtattgagttctgttcattttagcccaccactgtccccgcaacgcatggccgctgcgaacattggccatgttaaccagtgcgtcaaagtgcatgcggaagtcagttgtccggatatgcgttcatggtcgggtatctcctatccgttcaacaaattagcctacgctatcggcgatggcacgaccccagcgggtaatacgcatattgtgtgccttgggggggcccataatcatatccagccggaagaggacgtggaagcaacgaagatggccgttgaaaacatgtcgcctgggaatatggatatcaaacgtctggtcttccacaactggtgcaaggatgaatttgccaaaggcgcgtggttcttcgcccctccacagctgctgtcaaagagcctggatgaactgcgctgccgtcacggtaatgtcctgtttgcaaactccgattgggccttaggttggcgtggttttatcgatggtgctatcgaggagggcacccgcgcagcggttactgtaattgaggaactgcgtcctgcgcctgcggtgcgttcccacctg

SEQ ID NO: 340 - protein, 495 aa, synthetic construct
  REGION 1..495: note = Variant of monoamine oxidase
MTSRDGYQWTPETGLTQGVPSLGVISPPTNIEDTDKDGPWDVIVIGGGYCGLTATRDLTVAGFKTLLLEARDRIGGRSWSSNIDGYPYEMGGTWVHWHQSHVWREITRYKMHNALSPSFNFSRGVNHFQLRTNPTTSTYMTHEAEDELLRSALHKFTNVDGTNGRTVLPFPHDMFYVPEFRKYDEMSYSERIDQIRDELSLNERSSLEAFILLCSGGTLENSSFGEFLHWWAMSGYTYQGCMDCLISYKFKDGQSAFARRFWEEAAGTGRLGYVFGCPVRSVVNERDAVYVTARDGREFAAKRLVCTIPLNVLSSVHFSPPLSPQRMAAANIGHVNQCVKVHAEVSCPDMRSWSGISYPFNKLAYAIGDGTTPAGNTHIVCLGGAHNHIQPEEDVEATKMAVENMSPGNMDIKRLVFHNWCKDEFAKGAWFFAPPQLLSKSLDELRCRHGNVLFANSDWALGWRGFIDGAIEEGTRAAVTVIEELRPAPAVRSHL

SEQ ID NO: 341 - DNA, 1485 bp, synthetic construct
  misc_feature 1..1485: note = Variant of monoamine oxidase
  source 1..1485: mol_type = other DNA
atgaccagccgcgacggctatcagtggaccccggaaacgggtctgacccagggcgtaccgtccctgggtgtcatttcgccgccgactaacatcgaagataccgataaggacgggccttgggatgtcattgtcattgggggcgggtattgtgggctgaccgcaacccgtgatttaaccgtcgcagggttcaagacgctgctgctggaggcccgtgatcgtattggtggccgctcctggagcagtaatattgacggttacccgtatgagatgggtggcacttgggttcattggcatcaatctcacgtgtggcgtgaaatcacgcgttataaaatgcacaacgcgctgtctacgtcatttaacttttcacgtggcgtgaatcacttccaactgcgtaccaatccgaccaccagtacgtacatgacgcacgaagcggaggatgaactgctgcgtagcgcattgcataaattcaccaatgtcgacggcactaatggccgtacagtgttgccgttcccacatgatatgttttatgtgccggaatttcgcaagtatgacgaaatgtcatattccgaacgcattgaccagatccgcgacgaactgtctttgaacgaacgctctagtttagaggctttcattttattatgtagcggtggcaccctggaaaactccagctttggtgaatttctgcattggtgggcaatgtcgggttacacgtatcagggctgtatggattgtttaatctcctataaatttaaggatggccagagtgcgttcgcgcgtcgcttctgggaagaagccgctggcactggccgtctgggctatgtctttggttgtccggtgcgttctgtggtgaacgaacgcgacgcagtacgtgttaccgcacgtgacggtcgcgaattcgcagcgaaacgtttggtttgcacgattccgctgaacgtattgagttctgttcattttagcccaccactgtccccgcaacgcatggccgctgcgaacattggccatgttaaccagtgcgtcaaagtgcatgcggaagtcagttgtccggatatgcgttcatggtcgggtatctcctatccgttcaacaaattagcctacgctatcggcgatggcacgaccccagcgggtaatacgcatattgtgtgccttgggggggcccataatcatatccagccggaagaggacgtggaagcaacgaagatggccgttgaaaacatgtcgcctgggaatatggatatcaaacgtctggtcttccacaactggtgcaaggatgaatttgccaaaggcgcgtggttcttcgcccctccacagctgctgtcaaagagcctggatgaactgcgctgccgtcacggtaatgtcctgtttgcaaactccgattgggccttaggttggcgtggttttatcgatggtgctatcgaggagggcacccgcgcagcggttactgtaattgaggaactgcgtcctgcgcctgcggtgcgttcccacctg

SEQ ID NO: 342 - protein, 495 aa, synthetic construct
  REGION 1..495: note = Variant of monoamine oxidase
MTSRDGYQWTPETGLTQGVPSLGVISPPTNIEDTDKDGPWDVIVIGGGYCGLTATRDLTVAGFKTLLLEARDRIGGRSWSSNIDGYPYEMGGTWVHWHQSHVWREITRYKMHNALSTSFNFSRGVNHFQLRTNPTTSTYMTHEAEDELLRSALHKFTNVDGTNGRTVLPFPHDMFYVPEFRKYDEMSYSERIDQIRDELSLNERSSLEAFILLCSGGTLENSSFGEFLHWWAMSGYTYQGCMDCLISYKFKDGQSAFARRFWEEAAGTGRLGYVFGCPVRSVVNERDAVRVTARDGREFAAKRLVCTIPLNVLSSVHFSPPLSPQRMAAANIGHVNQCVKVHAEVSCPDMRSWSGISYPFNKLAYAIGDGTTPAGNTHIVCLGGAHNHIQPEEDVEATKMAVENMSPGNMDIKRLVFHNWCKDEFAKGAWFFAPPQLLSKSLDELRCRHGNVLFANSDWALGWRGFIDGAIEEGTRAAVTVIEELRPAPAVRSHL

SEQ ID NO: 343 - DNA, 1485 bp, synthetic construct
  misc_feature 1..1485: note = Variant of monoamine oxidase
  source 1..1485: mol_type = other DNA
atgaccagccgcgacggctatcagtggaccccggaaacgggtctgacccagggcgtaccgtccctgggtgtcatttcgccgccgactaacatcgaagataccgataaggacgggccttgggatgtcattgtcattgggggcgggtattgtgggctgaccgcaacccgtgatttaaccgtcgcagggttcaagacgctgctgctggaggcccgtgatcgtattggtggccgctcctggagcagtaatattgacggttacccgtatgagatgggtggcacttgggttcattggcatcaatctcacgtgtggcgtgaaatcacgcgttataaaatgcacaacgcgctgtctccatcatttaacttttcacgtggcgtgaatcacttccaactgcgtaccaatccgaccaccagtacgtacatgacgcacgaagcggaggatgaactgctgcgtagcgcattgcataaattcaccaatgtcgacggcactaatggccgtacagtgttgccgttcccacatgatatgttttatgtgccggaatttcgcaagtatgacgaaatgtcatattccgaacgcattgaccagatccgcgacgaactgtctttgaacgaacgctctagtttagaggctttcattttattatgtagcggtggcaccctggaaaactccagctttggtgaatttctgcattggtggacgatgtcgggttacacgtatcagggctgtatggattgtttaatctcctataaatttaaggatggccagagtgcgttcgcgcgtcgcttctgggaagaagccgctggcactggccgtctgggctatgtctttggttgtccggtgcgttctgtggtgaacgaacgcgacgcagtacgtgttaccgcacgtgacggtcgcgaattcgcagcgaaacgtttggtttgcacgattccgctgaacgtattgagttctgttcattttagcccaccactgtccccgcaacgcatggccgctgcgaacattggccatgttaaccagtgcgtcaaagtgcatgcggaagtcagttgtccggatatgcgttcatggtcgggtatctcctatccgttcaacaaattagcctacgctatcggcgatggcacgaccccagcgggtaatacgcatattgtgtgccttgggggggcccataatcatatccagccggaagaggacgtggaagcaacgaagatggccgttgaaaacatgtcgcctgggaatatggatatcaaacgtctggtcttccacaactggtgcaaggatgaatttgccaaaggcgcgtggttcttcgcccctccacagctgctgtcaaagagcctggatgaactgcgctgccgtcacggtaatgtcctgtttgcaaactccgattgggccttaggttggcgtggttttatcgatggtgctatcgaggagggcacccgcgcagcggttactgtaattgaggaactgcgtcctgcgcctgcggtgcgttcccacctg

SEQ ID NO: 344 - protein, 495 aa, synthetic construct
  REGION 1..495: note = Variant of monoamine oxidase
MTSRDGYQWTPETGLTQGVPSLGVISPPTNIEDTDKDGPWDVIVIGGGYCGLTATRDLTVAGFKTLLLEARDRIGGRSWSSNIDGYPYEMGGTWVHWHQSHVWREITRYKMHNALSPSFNFSRGVNHFQLRTNPTTSTYMTHEAEDELLRSALHKFTNVDGTNGRTVLPFPHDMFYVPEFRKYDEMSYSERIDQIRDELSLNERSSLEAFILLCSGGTLENSSFGEFLHWWTMSGYTYQGCMDCLISYKFKDGQSAFARRFWEEAAGTGRLGYVFGCPVRSVVNERDAVRVTARDGREFAAKRLVCTIPLNVLSSVHFSPPLSPQRMAAANIGHVNQCVKVHAEVSCPDMRSWSGISYPFNKLAYAIGDGTTPAGNTHIVCLGGAHNHIQPEEDVEATKMAVENMSPGNMDIKRLVFHNWCKDEFAKGAWFFAPPQLLSKSLDELRCRHGNVLFANSDWALGWRGFIDGAIEEGTRAAVTVIEELRPAPAVRSHL

SEQ ID NO: 345 - DNA, 1485 bp, synthetic construct
  misc_feature 1..1485: note = Variant of monoamine oxidase
  source 1..1485: mol_type = other DNA
atgaccagccgcgacggctatcagtggaccccggaaacgggtctgacccagggcgtaccgtccctgggtgtcatttcgccgccgactaacatcgaagataccgataaggacgggccttgggatgtcattgtcattgggggcgggtattgtgggctgaccgcaacccgtgatttaaccgtcgcagggttcaagacgctgctgctggaggcccgtgatcgtattggtggccgctcctggagcagtaatattgacggttacccgtatgagatgggtggcacttgggttcattggcatcaatctcacgtgtggcgtgaaatcacgcgttataaaatgcacaacgcgctgtctccatcatttaacttttcacgtggcgtgaatcacttccaactgcgtaccaatccgaccaccagtacgtacatgacgcacgaagcggaggatgaactgctgcgtagcgcattgcataaattcaccaatgtcgacggcactaatggccgtctggtgttgccgttcccacatgatatgttttatgtgccggaatttcgcaagtatgacgaaatgtcatattccgaacgcattgaccagatccgcgacgaactgtctttgaacgaacgctctagtttagaggctttcattttattatgtagcggtggcaccctggaaaactccagctttggtgaatttctgcattggtgggcaatgtcgggttacacgtatcagggctgtatggattgtttaatctcctataaatttaaggatggccagagtgcgttcgcgcgtcgcttctgggaagaagccgctggcactggccgtctgggctatgtctttggttgtccggtgcgttctgtggtgaacgaacgcgacgcagtacgtgttaccgcacgtgacggtcgcgaattcgcagcgaaacgtttggtttgcacgattccgctgaacgtattgagttctgttcattttagcccaccactgtccccgcaacgcatggccgctgcgaacattggccatgttaaccagtgcgtcaaagtgcatgcggaagtcagttgtccggatatgcgttcatggtcgggtatctcctatccgttcaacaaattagcctacgctatcggcgatggcacgaccccagcgggtaatacgcatattgtgtgccttgggggggcccataatcatatccagccggaagaggacgtggaagcaacgaagatggccgttgaaaacatgtcgcctgggaatatggatatcaaacgtctggtcttccacaactggtgcaaggatgaatttgccaaaggcgcgtggttcttcgcccctccacagctgctgtcaaagagcctggatgaactgcgctgccgtcacggtaatgtcctgtttgcaaactccgattgggccttaggttggcgtggttttatcgatggtgctatcgaggagggcacccgcgcagcggttactgtaattgaggaactgcgtcctgcgcctgcggtgcgttcccacctg

SEQ ID NO: 346 - protein, 495 aa, synthetic construct
  REGION 1..495: note = Variant of monoamine oxidase
MTSRDGYQWTPETGLTQGVPSLGVISPPTNIEDTDKDGPWDVIVIGGGYCGLTATRDLTVAGFKTLLLEARDRIGGRSWSSNIDGYPYEMGGTWVHWHQSHVWREITRYKMHNALSPSFNFSRGVNHFQLRTNPTTSTYMTHEAEDELLRSALHKFTNVDGTNGRLVLPFPHDMFYVPEFRKYDEMSYSERIDQIRDELSLNERSSLEAFILLCSGGTLENSSFGEFLHWWAMSGYTYQGCMDCLISYKFKDGQSAFARRFWEEAAGTGRLGYVFGCPVRSVVNERDAVRVTARDGREFAAKRLVCTIPLNVLSSVHFSPPLSPQRMAAANIGHVNQCVKVHAEVSCPDMRSWSGISYPFNKLAYAIGDGTTPAGNTHIVCLGGAHNHIQPEEDVEATKMAVENMSPGNMDIKRLVFHNWCKDEFAKGAWFFAPPQLLSKSLDELRCRHGNVLFANSDWALGWRGFIDGAIEEGTRAAVTVIEELRPAPAVRSHL

SEQ ID NO: 347 - DNA, 1485 bp, synthetic construct
  misc_feature 1..1485: note = Variant of monoamine oxidase
  source 1..1485: mol_type = other DNA
atgaccagccgcgacggctatcagtggaccccggaaacgggtctgacccagggcgtaccgtccctgggtgtcatttcgccgccgactaacatcgaagataccgataaggacgggccttgggatgtcattgtcattgggggcgggtattgtgggctgaccgcaactcgtgatttaaccgtcgcagggttcaagacgctgctgctggaggcccgtgatcgtattggtggccgctcctggagcagtaatattgacggttacccgtatgagatgggtggcacttgggttcattggcatcaatctcacgtgtggcgtgaaatcacgcgttataaaatgcacaacgcgctgtcgccatcatttaatttttcacgtggcgtgaatcacttccaactgcgtaccaatccgaccaccagtacgtacatgacgcacgaagcggaggatgaactgctgcgtagcgcattgcataaattcaccaatgtcgacggcactaatggccgtacagtgttgccgttcccacatgatatgttttatgtgccggaatttcgcaagtatgacgaaatgtcatattccgaacgcattgaccagatccgcgacgaactgtctttgaacgaacgctctagtttagaggctttcattttattatgtagcggtggcaccctggaaaactccagctttggtgaatttctgcattggtgggcaatgtcgggttacacgtatcagggctgtatggattgtttaatctcctataaatttaaggatggccagagtgcgttcgcgcgtcgcttctgggaagaagccgctggcactggccgtctgggctatgtctttggttgtccggtgcgttctgtggtgaacgaacgcgacgcagtacgtgttaccgcacgtgacggtcgcgaattcgcagcgaaacgtttggtttgcacgattccgctgaacgtattgagttctgttcattttagcccaccactgtccccgcaacgtatggccgctgcgaacattggccatgttaaccagtgcgtcaaagtgcatgcggaagtcagtgatccagatatgcgttcatggtcgggtatctcctatccgttcaacaaattagcctacgctatcggcgatggcacgaccccagcgggtaatacgcatattgtgtgccttgggggggcccataatcatatccagccggaagaggacgtggaagcaacgaagatggccgttgaaaacatgtcgcctgggaatatggatatcaaacgtctggtcttccacaactggtgcaaggatgaatttgccaaaggcgcgtggttcttcgcccctccacaactgctgtcaaagagcctggatgaactgcgctgccgtcacggtaatgtcctgtttgcaaactccgattgggccttaggttggcgtggttttatcgatggtgctatcgaggagggcacccgcgcagcggttactgtaattgaggaactgcgtcctgcgcctgcggtgcgttcccacctg

SEQ ID NO: 348 - protein, 495 aa, synthetic construct
  REGION 1..495: note = Variant of monoamine oxidase
MTSRDGYQWTPETGLTQGVPSLGVISPPTNIEDTDKDGPWDVIVIGGGYCGLTATRDLTVAGFKTLLLEARDRIGGRSWSSNIDGYPYEMGGTWVHWHQSHVWREITRYKMHNALSPSFNFSRGVNHFQLRTNPTTSTYMTHEAEDELLRSALHKFTNVDGTNGRTVLPFPHDMFYVPEFRKYDEMSYSERIDQIRDELSLNERSSLEAFILLCSGGTLENSSFGEFLHWWAMSGYTYQGCMDCLISYKFKDGQSAFARRFWEEAAGTGRLGYVFGCPVRSVVNERDAVRVTARDGREFAAKRLVCTIPLNVLSSVHFSPPLSPQRMAAANIGHVNQCVKVHAEVSDPDMRSWSGISYPFNKLAYAIGDGTTPAGNTHIVCLGGAHNHIQPEEDVEATKMAVENMSPGNMDIKRLVFHNWCKDEFAKGAWFFAPPQLLSKSLDELRCRHGNVLFANSDWALGWRGFIDGAIEEGTRAAVTVIEELRPAPAVRSHL

SEQ ID NO: 349 - DNA, 1485 bp, synthetic construct
  misc_feature 1..1485: note = Variant of monoamine oxidase
  source 1..1485: mol_type = other DNA
atgaccagccgcgacggctatcagtggaccccggaaacgggtctgacccagggcgtaccgtccctgggtgtcatttcgccgccgactaacatcgaagataccgataaggacgggccttgggatgtcattgtcattgggggcgggtattgtgggctgaccgcaacccgtgatttaaccgtcgcagggttcaagacgctgctgctggaggcccgtgatcgtattggtggccgctcctggagcagtaatattgacggttacccgtatgagatgggtggcacttgggttcattggcatcaatctcacgtgtggcgtgaaatcacgcgttataaaatgcacaacgcgctgtctccatcatttaacttttcacgtggcgtgaataggttccaactgcgtaccaatccgaccaccagtacgtacatgacgcacgaagcggaggatgaactgctgcgtagcgcattgcataaattcaccaatgtcgacggcactaatggccgtacagtgttgccgttcccacatgatatgttttatgtgccggaatttcgcaagtatgacgaaatgtcatattccgaacgcattgaccagatccgcgacgaactgtctttgaacgaacgctctagtttagaggctttcattttattatgtagcggtggcaccctggaaaactccagctttggtgaatttctgcattggtgggcaatgtcgggttacacgtatcagggctgtatggattgtttaatctcctataaatttaaggatggccagagtgcgttcgcgcgtcgcttctgggaagaagccgctggcactggccgtctgggctatgtctttggttgtccggtgcgttctgtggtgaacgaacgcgacgcagtacgtgttaccgcacgtgacggtcgcgaattcgcagcgaaacgtttggtttgcacgattccgctgaacgtattgagttctgttcattttagcccaccactgtccccgcaacgcatggccgctgcgaacattggccatgttaaccagtgcgtcaaagtgcatgcggaagtcagttgtccggatatgcgttcatggtcgggtatctcctatccgttcaacaaattagcctacgctatcggcgatggcacgaccccagcgggtaatacgcatattgtgtgccttgggggggcccataatcatatccagccggaagaggacgtggaagcaacgaagatggccgttgaaaacatgtcgcctgggaatatggatatcaaacgtctggtcttccacaactggtgcaaggatgaatttgccaaaggcgcgtggttcttcgcccctccacagctgctgtcaaagagcctggatgaactgcgctgccgtcacggtaatgtcctgtttgcaaactccgattgggccttaggttggcgtggttttatcgatggtgctatcgaggagggcacccgcgcagcggttactgtaattgaggaactgcgtcctgcgcctgcggtgcgttcccacctg

SEQ ID NO: 350 - protein, 495 aa, synthetic construct
  REGION 1..495: note = Variant of monoamine oxidase
MTSRDGYQWTPETGLTQGVPSLGVISPPTNIEDTDKDGPWDVIVIGGGYCGLTATRDLTVAGFKTLLLEARDRIGGRSWSSNIDGYPYEMGGTWVHWHQSHVWREITRYKMHNALSPSFNFSRGVNRFQLRTNPTTSTYMTHEAEDELLRSALHKFTNVDGTNGRTVLPFPHDMFYVPEFRKYDEMSYSERIDQIRDELSLNERSSLEAFILLCSGGTLENSSFGEFLHWWAMSGYTYQGCMDCLISYKFKDGQSAFARRFWEEAAGTGRLGYVFGCPVRSVVNERDAVRVTARDGREFAAKRLVCTIPLNVLSSVHFSPPLSPQRMAAANIGHVNQCVKVHAEVSCPDMRSWSGISYPFNKLAYAIGDGTTPAGNTHIVCLGGAHNHIQPEEDVEATKMAVENMSPGNMDIKRLVFHNWCKDEFAKGAWFFAPPQLLSKSLDELRCRHGNVLFANSDWALGWRGFIDGAIEEGTRAAVTVIEELRPAPAVRSHL

SEQ ID NO: 351 - DNA, 1485 bp, synthetic construct
  misc_feature 1..1485: note = Variant of monoamine oxidase
  source 1..1485: mol_type = other DNA
atgaccagccgcgacggctatcagtggaccccggaaacgggtctgacccagggcgtaccgtccctgggtgtcatttcgccgccgactaacatcgaagataccgataaggacgggccttgggatgtcattgtcattgggggcgggtattgtgggctgaccgcaacccgtgatttaaccgtcgcagggttcaagacgctgctgctggaggcccgtgatcgtattggtggccgctcctggagcagtaatattgacggttacccgtatgagatgggtggcacttgggttcattggcatcaatctcacgtgtggcgtgaaatcacgcgttataaaatgcacaacgcgctgtctccatcatttaacttttcacgtggcgtgaatcacttccaactgcgtaccaatccgaccaccagtacgtacatgacgcacgaagcggaggatgaactgctgcgtagcgcattgcataaattcaccaatgtcgacggcactaatggccgtacagtgttgccgttcccacatgatatgttttatgtgccggaatttcgcaagtatgacgaaatgtcatattccgaacgcattgaccagatccgcgacgaactgtctttgaacgaacgctctagtttagaggctttcattttattatgtagcggtggcaccctggaaaactccagctttggtgaatttctgcattggtgggcaatgtcgggttacacgtatcagggctgtatggattgtttaatctcctataaatttaaggatggccagagtgcgttcgcgcgtcgcttctgggaagaagccgctggcactggccgtctgggctatgtctttggttgtccggtgcgttctgtggtgaacgaacgcgacgcagtacgtgttaccgcacgtgacggtcgcgaattcgcagcgaaacgtttggtttgcacgattccgctgaacgtattgagttctgttcattttagcccaccactgtccccgcaacgcatggccgctgcgaacattggccatgttaaccagtgcgtcaaagtgcatgcggaagtcagttgtccggatatgcgttcatggtcgggtatctcctatccgttcaacaaattagcctacgctatcggcgatggcacgaccccagcgggtaatacgcatattgtgtgccttgggggggcccataatcatatccagccggaagaggacgtggaagcaacgaagatggccgttgaaaacatgtcgcctgggaatatggatatcaaacgtctggtcttccacaactggtgcaaggatgaatttgccaaaggcgcgtggttcttcgcccctccacagctgctgtcaaagagcctggattctctgcgctgccgtcacggtaatgtcctgtttgcaaactccgattgggccttaggttggcgtggttttatcgatggtgctatcgaggagggcacccgcgcagcggttactgtaattgaggaactgcgtcctgcgcctgcggtgcgttcccacctg

SEQ ID NO: 352 - protein, 495 aa, synthetic construct
  REGION 1..495: note = Variant of monoamine oxidase
MTSRDGYQWTPETGLTQGVPSLGVISPPTNIEDTDKDGPWDVIVIGGGYCGLTATRDLTVAGFKTLLLEARDRIGGRSWSSNIDGYPYEMGGTWVHWHQSHVWREITRYKMHNALSPSFNFSRGVNHFQLRTNPTTSTYMTHEAEDELLRSALHKFTNVDGTNGRTVLPFPHDMFYVPEFRKYDEMSYSERIDQIRDELSLNERSSLEAFILLCSGGTLENSSFGEFLHWWAMSGYTYQGCMDCLISYKFKDGQSAFARRFWEEAAGTGRLGYVFGCPVRSVVNERDAVRVTARDGREFAAKRLVCTIPLNVLSSVHFSPPLSPQRMAAANIGHVNQCVKVHAEVSCPDMRSWSGISYPFNKLAYAIGDGTTPAGNTHIVCLGGAHNHIQPEEDVEATKMAVENMSPGNMDIKRLVFHNWCKDEFAKGAWFFAPPQLLSKSLDSLRCRHGNVLFANSDWALGWRGFIDGAIEEGTRAAVTVIEELRPAPAVRSHL

SEQ ID NO: 353 - DNA, 1485 bp, synthetic construct
  misc_feature 1..1485: note = Variant of monoamine oxidase
  source 1..1485: mol_type = other DNA
atgaccagccgcgacggctatcagtggaccccggaaacgggtctgacccagggcgtaccgtccctgggtgtcatttcgccgccgactaacatcgaagataccgataaggacgggccttgggatgtcattgtcattgggggcgggtattgtgggctgaccgcaacccgtgatttaaccgtcgcagggttcaagacgctgctgctggaggcccgtgatcgtattggtggccgctcctggagcagtaatattgacggttacccgtatgagatgggtggcacttgggttcattggcatcaatctcacgtgtggcgtgaaatcacgcgttataaaatgcacaacgcgctgtctccatcatttaacttttcacgtggcgtgaatcacttccaactgcgtaccaatccgaccaccagtacgtacatgacgcacgaagcggaggatgaactgctgcgtagcgcattgcataaattcaccaatgtcgacggcactaatggccgtacagtgttgccgttcccacatgatatgttttatgtgccggaatttcgcaagtatgacgaaatgtcatattccgaacgcattgaccagatccgcgacgaactgtctttgaacgaacgctctagtttagaggctttcattttattatgtagcggtggcaccctggaaaactccagctttggtgaatttctgcattggtgggcaatgtcgggttacacgtatcagggctgtatggattgtttaatctcctataaatttaaggatggccagagtgcgttcgcgcgtcgcttctgggaagaagccgctggcactggccgtctgggctatgtctttggttgtccggtgcgttctgtggtgaacgaacgcgacgcagtacgtgttaccgcacgtgacggtcgcgaattcgcagcgaaacgtttggtttgcacgattccgctgaacgtattgagttctgttcattttagcccaccactgtccccgcaacgcatggccgctgcgaacattggccatgttaaccagtgcgtcaaagtgcatgcggaagtcagttgtccggatatgcgttcatggtcgggtatctcctatccgttcaacaaattagcctacgctatcggcgatggcacgaccccagcgggtaatacgcatattgtgtgccttgggggggcccataatcatatccagccggaagaggacgtggaagcaacgaagatggccgttgaaaacatgtcgcctgggaatatggatatcaaacgtctggtcttccacaactggtgcaaggatgaatttgccaaaggcgcgtggttcttcgcccctccacagctgctgtcaaagagcctggatgaactgcgctgccgtcacggtaatgtcctgtttgcaaactccgattgggccttaggttggcgtggttttatcgatggtgctatcgaggagggctctcgcgcagcggttactgtaattgaggaactgcgtcctgcgcctgcggtgcgttcccacctg

SEQ ID NO: 354 - protein, 495 aa, synthetic construct
  REGION 1..495: note = Variant of monoamine oxidase
MTSRDGYQWTPETGLTQGVPSLGVISPPTNIEDTDKDGPWDVIVIGGGYCGLTATRDLTVAGFKTLLLEARDRIGGRSWSSNIDGYPYEMGGTWVHWHQSHVWREITRYKMHNALSPSFNFSRGVNHFQLRTNPTTSTYMTHEAEDELLRSALHKFTNVDGTNGRTVLPFPHDMFYVPEFRKYDEMSYSERIDQIRDELSLNERSSLEAFILLCSGGTLENSSFGEFLHWWAMSGYTYQGCMDCLISYKFKDGQSAFARRFWEEAAGTGRLGYVFGCPVRSVVNERDAVRVTARDGREFAAKRLVCTIPLNVLSSVHFSPPLSPQRMAAANIGHVNQCVKVHAEVSCPDMRSWSGISYPFNKLAYAIGDGTTPAGNTHIVCLGGAHNHIQPEEDVEATKMAVENMSPGNMDIKRLVFHNWCKDEFAKGAWFFAPPQLLSKSLDELRCRHGNVLFANSDWALGWRGFIDGAIEEGSRAAVTVIEELRPAPAVRSHL

SEQ ID NO: 355 - DNA, 1485 bp, synthetic construct
  misc_feature 1..1485: note = Variant of monoamine oxidase
  source 1..1485: mol_type = other DNA
atgaccagccgcgacggctatcagtggaccccggaaacgggtctgacccagggcgtaccgtccctgggtgtcatttcgccgccgactaacatcgaagataccgataaggacgggccttgggatgtcattgtcattgggggcgggtattgtgggctgaccgcaacccgtgatttaaccgtcgcagggttcaagacgctgctgctggaggcccgtgatcgtattggtggccgctcctggagcagtaatattgacggttacccgtatgagatgggtggcacttgggttcattggcatcaatctcacgtgtggcgtgaaatcacgcgttataaaatgcacaacgcgctgtctccatcatttaacttttcacgtggcgtgaatcacttccaactgcgtaccaatccgaccaccagtacgtacatgacgcacgaagcggaggatgaactgctgcgtagcgcattgcataaattcaccaatgtcgacgatactaatggccgtacagtgttgccgttcccacatgatatgttttatgtgccggaatttcgcaagtatgacgaaatgtcatattccgaacgcattgaccagatccgcgacgaactgtctttgaacgaacgctctagtttagaggctttcattttattatgtagcggtggcaccctggaaaactccagctttggtgaatttctgcattggtgggcaatgtcgggttacacgtatcagggctgtatggattgtttaatctcctataaatttaaggatggccagagtgcgttcgcgcgtcgcttctgggaagaagccgctggcactggccgtctgggctatgtctttggttgtccggtgcgttctgtggtgaacgaacgcgacgcagtacgtgttaccgcacgtgacggtcgcgaattcgcagcgaaacgtttggtttgcacgattccgctgaacgtattgagttctgttcattttagcccaccactgtccccgcaacgcatggccgctgcgaacattggccatgttaaccagtgcgtcaaagtgcatgcggaagtcagttgtccggatatgcgttcatggtcgggtatctcctatccgttcaacaaattagcctacgctatcggcgatggcacgaccccagcgggtaatacgcatattgtgtgccttgggggggcccataatcatatccagccggaagaggacgtggaagcaacgaagatggccgttgaaaacatgtcgcctgggaatatggatatcaaacgtctggtcttccacaactggtgcaaggatgaatttgccaaaggcgcgtggttcttcgcccctccacagctgctgtcaaagagcctggatgaactgcgctgccgtcacggtaatgtcctgtttgcaaactccgattgggccttaggttggcgtggttttatcgatggtgctatcgaggagggcacccgcgcagcggttactgtaattgaggaactgcgtcctgcgcctgcggtgcgttcccacctg

SEQ ID NO: 356 - protein, 495 aa, synthetic construct
  REGION 1..495: note = Variant of monoamine oxidase
MTSRDGYQWTPETGLTQGVPSLGVISPPTNIEDTDKDGPWDVIVIGGGYCGLTATRDLTVAGFKTLLLEARDRIGGRSWSSNIDGYPYEMGGTWVHWHQSHVWREITRYKMHNALSPSFNFSRGVNHFQLRTNPTTSTYMTHEAEDELLRSALHKFTNVDDTNGRTVLPFPHDMFYVPEFRKYDEMSYSERIDQIRDELSLNERSSLEAFILLCSGGTLENSSFGEFLHWWAMSGYTYQGCMDCLISYKFKDGQSAFARRFWEEAAGTGRLGYVFGCPVRSVVNERDAVRVTARDGREFAAKRLVCTIPLNVLSSVHFSPPLSPQRMAAANIGHVNQCVKVHAEVSCPDMRSWSGISYPFNKLAYAIGDGTTPAGNTHIVCLGGAHNHIQPEEDVEATKMAVENMSPGNMDIKRLVFHNWCKDEFAKGAWFFAPPQLLSKSLDELRCRHGNVLFANSDWALGWRGFIDGAIEEGTRAAVTVIEELRPAPAVRSHL

SEQ ID NO: 357 - DNA, 1485 bp, synthetic construct
  misc_feature 1..1485: note = Variant of monoamine oxidase
  source 1..1485: mol_type = other DNA
atgaccagccgcgacggctatcagtggaccccggaaacgggtctgacccagggcgtaccgtccctgggtgtcatttcgccgccgactaacatcgaagataccgataaggacgggccttgggatgtcattgtcattgggggcgggtattgtgggctgaccgcaacccgtgatttaaccgtcgcagggttcaagacgctgctgctggaggcccgtgatcgtattggtggccgctcctggagcagtaatattgacggttacccgtatgagatgggtggcacttgggttcattggcatcaatctcacgtgtggcgtgaaatcacgcgttataaaatgcacaacgcgctgtctccatcatttaacttttcacgtggcgtgaatcacttccaactgcgtaccaatccgaccaccagtacgtacatgacgcacgaagcggaggatgaactgctgcgtagcgcattgcataaattcaccaatgtcgacggcactaatggccgtacagtgttgccgttcccacatgatatgttttatgtgccggaatttcgcaagtatgacgaaatgtcatattccgaacgcattgaccagatccgcgacgaaatttctttgaacgaacgctctagtttagaggctttcattttattatgtagcggtggcaccctggaaaactccagctttggtgaatttctgcattggtgggcaatgtcgggttacacgtatcagggctgtatggattgtttaatctcctataaatttaaggatggccagagtgcgttcgcgcgtcgcttctgggaagaagccgctggcactggccgtctgggctatgtctttggttgtccggtgcgttctgtggtgaacgaacgcgacgcagtacgtgttaccgcacgtgacggtcgcgaattcgcagcgaaacgtttggtttgcacgattccgctgaacgtattgagttctgttcattttagcccaccactgtccccgcaacgcatggccgctgcgaacattggccatgttaaccagtgcgtcaaagtgcatgcggaagtcagttgtccggatatgcgttcatggtcgggtatctcctatccgttcaacaaattagcctacgctatcggcgatggcacgaccccagcgggtaatacgcatattgtgtgccttgggggggcccataatcatatccagccggaagaggacgtggaagcaacgaagatggccgttgaaaacatgtcgcctgggaatatggatatcaaacgtctggtcttccacaactggtgcaaggatgaatttgccaaaggcgcgtggttcttcgcccctccacagctgctgtcaaagagcctggatgaactgcgctgccgtcacggtaatgtcctgtttgcaaactccgattgggccttaggttggcgtggttttatcgatggtgctatcgaggagggcacccgcgcagcggttactgtaattgaggaactgcgtcctgcgcctgcggtgcgttcccacctg

SEQ ID NO: 358 - protein, 495 aa, synthetic construct
  REGION 1..495: note = Variant of monoamine oxidase
MTSRDGYQWTPETGLTQGVPSLGVISPPTNIEDTDKDGPWDVIVIGGGYCGLTATRDLTVAGFKTLLLEARDRIGGRSWSSNIDGYPYEMGGTWVHWHQSHVWREITRYKMHNALSPSFNFSRGVNHFQLRTNPTTSTYMTHEAEDELLRSALHKFTNVDGTNGRTVLPFPHDMFYVPEFRKYDEMSYSERIDQIRDEISLNERSSLEAFILLCSGGTLENSSFGEFLHWWAMSGYTYQGCMDCLISYKFKDGQSAFARRFWEEAAGTGRLGYVFGCPVRSVVNERDAVRVTARDGREFAAKRLVCTIPLNVLSSVHFSPPLSPQRMAAANIGHVNQCVKVHAEVSCPDMRSWSGISYPFNKLAYAIGDGTTPAGNTHIVCLGGAHNHIQPEEDVEATKMAVENMSPGNMDIKRLVFHNWCKDEFAKGAWFFAPPQLLSKSLDELRCRHGNVLFANSDWALGWRGFIDGAIEEGTRAAVTVIEELRPAPAVRSHL

SEQ ID NO: 359 - DNA, 1485 bp, synthetic construct
  misc_feature 1..1485: note = Variant of monoamine oxidase
  source 1..1485: mol_type = other DNA
atgaccagccgcgacggctatcagtggaccccggaaacgggtctgacccagggcgtaccgtccctgggtgtcatttcgccgccgactaacatcgaagataccgataaggacgggccttgggatgtcattgtcattgggggcgggtattgtgggctgaccgcaacccgtgatttaaccgtcgcagggttcaagacgctgctgctggaggcccgtgatcgtattggtggccgctcctggagcagtaatattgacgattacccgtatgagatgggtggcacttgggttcattggcatcaatctcacgtgtggcgtgaaatcacgcgttataaaatgcacaacgcgctgtctccatcatttaacttttcacgtggcgtgaatcacttccaactgcgtaccaatccgaccaccagtacgtacatgacgcacgaagcggaggatgaactgctgaggagcgcattgcataaattcaccaatgtcgacggcactaatggccgtacagtgttgccgttcccacatgatatgttttatgtgccggaatttcgcaagtatgacgaaatgtcatattccgaacgcattgaccagatccgcgacgaactgtctttgaacgaacgctctagtttagaggctttcattttattatgtagcggtggcaccctggaaaactccagctttggtgaatttctgcattggtgggcaatgtcgggttacacgtatcagggctgtatggattgtttaatctcctataaatttaaggatggccagagtgcgttcgcgcgtcgcttctgggaagaagccgctggcactggccgtctgggctatgtctttggttgtccggtgcgttctgtggtgaacgaacgcgacgcagtacgtgttaccgcacgtgacggtcgcgaattcgcagcgaaacgtttggtttgcacgattccgctgaacgtattgagttctgttcattttagcccaccactgtccccgcaacgcatggccgctgcgaacattggccatgttaaccagtgcgtcaaagtgcatgcggaagtcagttgtccggatatgcgttcatggtcgggtatctcctatccgttcaacaaattagcctacgctatcggcgatggcacgaccccagcgggtaatacgcatattgtgtgccttgggggggcccataatcatatccagccggaagaggacgtggaagcaacgaagatggccgttgaaaacatgtcgcctgggaatatggatatcaaacgtctggtcttccacaactggtgcaaggatgaatttgccaaaggcgcgtggttcttcgcccctccacagctgctgtcaaagagcctggatgaactgcgctgccgtcacggtaatgtcctgtttgcaaactccgattgggccttaggttggcgtggttttatcgatggtgctatcgaggagggcacccgcgcagcggttactgtaattgaggaactgcgtcctgcgcctgcggtgcgttcccacctg

SEQ ID NO: 360 - protein, 495 aa, synthetic construct
  REGION 1..495: note = Variant of monoamine oxidase
MTSRDGYQWTPETGLTQGVPSLGVISPPTNIEDTDKDGPWDVIVIGGGYCGLTATRDLTVAGFKTLLLEARDRIGGRSWSSNIDDYPYEMGGTWVHWHQSHVWREITRYKMHNALSPSFNFSRGVNHFQLRTNPTTSTYMTHEAEDELLRSALHKFTNVDGTNGRTVLPFPHDMFYVPEFRKYDEMSYSERIDQIRDELSLNERSSLEAFILLCSGGTLENSSFGEFLHWWAMSGYTYQGCMDCLISYKFKDGQSAFARRFWEEAAGTGRLGYVFGCPVRSVVNERDAVRVTARDGREFAAKRLVCTIPLNVLSSVHFSPPLSPQRMAAANIGHVNQCVKVHAEVSCPDMRSWSGISYPFNKLAYAIGDGTTPAGNTHIVCLGGAHNHIQPEEDVEATKMAVENMSPGNMDIKRLVFHNWCKDEFAKGAWFFAPPQLLSKSLDELRCRHGNVLFANSDWALGWRGFIDGAIEEGTRAAVTVIEELRPAPAVRSHL

SEQ ID NO: 361 - DNA, 1485 bp, synthetic construct
  misc_feature 1..1485: note = Variant of monoamine oxidase
  source 1..1485: mol_type = other DNA
atgaccagccgcgacggctatcagtggaccccggaaacgggtctgacccagggcgtaccgtccctgggtgtcatttcgccgccgactaacatcgaagataccgataaggacgggccttgggatgtcattgtcattgggggcgggtattgtgggctgaccgcaacccgtgatttaaccgtcgcagggttcaagacgctgctgctggaggcccgtgatcgtattggtggccgctcctggagcagtaatattgacggttacccgtatgagatgggtggcacttgggttcattggcatcaatctcacgtgtggcgtgaaatcacgcgttataaaatgcacaacgcgctgtctccatcatttaacttttcacgtggcgtgaatcacttccaactgcgtaccaatccgaccaccagtacgtacatgacgcacgaagcggaggatgaactgctgcgtagcgcattgcataaattcaccaatgtcgacggcactaatggccgtacagtgttgccgttcccacatgatatgttttatgtgccggaatttggtaagtatgacgaaatgtcatattccgaacgcattgaccagatccgcgacgaactgtctttgaacgaacgctctagtttagaggctttcattttattatgtagcggtggcaccctggaaaactccagctttggtgaatttctgcattggtgggcaatgtcgggttacacgtatcagggctgtatggattgtttaatctcctataaatttaaggatggccagagtgcgttcgcgcgtcgcttctgggaagaagccgctggcactggccgtctgggctatgtctttggttgtccggtgcgttctgtggtgaacgaacgcgacgcagtacgtgttaccgcacgtgacggtcgcgaattcgcagcgaaacgtttggtttgcacgattccgctgaacgtattgagttctgttcattttagcccaccactgtccccgcaacgcatggccgctgcgaacattggccatgttaaccagtgcgtcaaagtgcatgcggaagtcagttgtccggatatgcgttcatggtcgggtatctcctatccgttcaacaaattagcctacgctatcggcgatggcacgaccccagcgggtaatacgcatattgtgtgccttgggggggcccataatcatatccagccggaagaggacgtggaagcaacgaagatggccgttgaaaacatgtcgcctgggaatatggatatcaaacgtctggtcttccacaactggtgcaaggatgaatttgccaaaggcgcgtggttcttcgcccctccacagctgctgtcaaagagcctggatgaactgcgctgccgtcacggtaatgtcctgtttgcaaactccgattgggccttaggttggcgtggttttatcgatggtgctatcgaggagggcacccgcgcagcggttactgtaattgaggaactgcgtcctgcgcctgcggtgcgttcccacctg

SEQ ID NO: 362 - protein, 495 aa, synthetic construct
  REGION 1..495: note = Variant of monoamine oxidase
MTSRDGYQWTPETGLTQGVPSLGVISPPTNIEDTDKDGPWDVIVIGGGYCGLTATRDLTVAGFKTLLLEARDRIGGRSWSSNIDGYPYEMGGTWVHWHQSHVWREITRYKMHNALSPSFNFSRGVNHFQLRTNPTTSTYMTHEAEDELLRSALHKFTNVDGTNGRTVLPFPHDMFYVPEFGKYDEMSYSERIDQIRDELSLNERSSLEAFILLCSGGTLENSSFGEFLHWWAMSGYTYQGCMDCLISYKFKDGQSAFARRFWEEAAGTGRLGYVFGCPVRSVVNERDAVRVTARDGREFAAKRLVCTIPLNVLSSVHFSPPLSPQRMAAANIGHVNQCVKVHAEVSCPDMRSWSGISYPFNKLAYAIGDGTTPAGNTHIVCLGGAHNHIQPEEDVEATKMAVENMSPGNMDIKRLVFHNWCKDEFAKGAWFFAPPQLLSKSLDELRCRHGNVLFANSDWALGWRGFIDGAIEEGTRAAVTVIEELRPAPAVRSHL

SEQ ID NO: 363 - DNA, 1485 bp, synthetic construct
  misc_feature 1..1485: note = Variant of monoamine oxidase
  source 1..1485: mol_type = other DNA
atgaccagccgcgacggctatcagtggaccccggaaacgggtctgacccagggcgtaccgtccctgggtgtcatttcgccgccgactaacatcgaagataccgataaggacgggccttgggatgtcattgtcattgggggcgggtattgtgggctgaccgcaacccgtgatttaaccgtcgcagggttcaagacgctgctgctggaggcccgtgatcgtattggtggccgctcctggagcagtaatattgacggttacccgtatgagatgggtggcacttgggttcattggcatcaatctcacgtgtggcgtgaaatcacgcgttataaaatgcacaacgcgctgtctccatcatttaacttttcacgtggcgtgaatcacttccaactgcgtaccaatccgaccaccagtacgtacatgacgcacgaagcggaggatgaactgctgcgtagcgcattgcataaattcaccaatgtcgacggcactaatggccgtacagtgttgccgttcccacatgatagtttttatgtgccggaatttcgcaagtatgacgaaatgtcatattccgaacgcattgaccagatccgcgacgaactgtctttgaacgaacgctctagtttagaggctttcattttattatgtagcggtggcaccctggaaaactccagctttggtgaatttctgcattggtgggcaatgtcgggttacacgtatcagggctgtatggattgtttaatctcctataaatttaaggatggccagagtgcgttcgcgcgtcgcttctgggaagaagccgctggcactggccgtctgggctatgtctttggttgtccggtgcgttctgtggtgaacgaacgcgacgcagtacgtgttaccgcacgtgacggtcgcgaattcgcagcgaaacgtttggtttgcacgattccgctgaacgtattgagttctgttcattttagcccaccactgtccccgcaacgcatggccgctgcgaacattggccatgttaaccagtgcgtcaaagtgcatgcggaagtcagttgtccggatatgcgttcatggtcgggtatctcctatccgttcaacaaattagcctacgctatcggcgatggcacgaccccagcgggtaatacgcatattgtgtgccttgggggggcccataatcatatccagccggaagaggacgtggaagcaacgaagatggccgttgaaaacatgtcgcctgggaatatggatatcaaacgtctggtcttccacaactggtgcaaggatgaatttgccaaaggcgcgtggttcttcgcccctccacagctgctgtcaaagagcctggatgaactgcgctgccgtcacggtaatgtcctgtttgcaaactccgattgggccttaggttggcgtggttttatcgatggtgctatcgaggagggcacccgcgcagcggttactgtaattgaggaactgcgtcctgcgcctgcggtgcgttcccacctg

SEQ ID NO: 364 - protein, 495 aa, synthetic construct
  REGION 1..495: note = Variant of monoamine oxidase
MTSRDGYQWTPETGLTQGVPSLGVISPPTNIEDTDKDGPWDVIVIGGGYCGLTATRDLTVAGFKTLLLEARDRIGGRSWSSNIDGYPYEMGGTWVHWHQSHVWREITRYKMHNALSPSFNFSRGVNHFQLRTNPTTSTYMTHEAEDELLRSALHKFTNVDGTNGRTVLPFPHDSFYVPEFRKYDEMSYSERIDQIRDELSLNERSSLEAFILLCSGGTLENSSFGEFLHWWAMSGYTYQGCMDCLISYKFKDGQSAFARRFWEEAAGTGRLGYVFGCPVRSVVNERDAVRVTARDGREFAAKRLVCTIPLNVLSSVHFSPPLSPQRMAAANIGHVNQCVKVHAEVSCPDMRSWSGISYPFNKLAYAIGDGTTPAGNTHIVCLGGAHNHIQPEEDVEATKMAVENMSPGNMDIKRLVFHNWCKDEFAKGAWFFAPPQLLSKSLDELRCRHGNVLFANSDWALGWRGFIDGAIEEGTRAAVTVIEELRPAPAVRSHL

SEQ ID NO: 365 - DNA, 1485 bp, synthetic construct
  misc_feature 1..1485: note = Variant of monoamine oxidase
  source 1..1485: mol_type = other DNA
atgaccagccgcgacggctatcagtggaccccggaaacgggtctgacccagggcgtaccgtccctgggtgtcatttcgccgccgactaacatcgaagataccgataaggacgggccttgggatgtcattgtcattgggggcgggtattgtgggctgaccgcaacccgtgatttaaccgtcgcagggttcaagacgctgctgctggaggcccgtgatcgtattggtggccgctcctggagcagtaatattgacggttacccgtatgagatgggtggcacttgggttcattggcatcaatctcacgtgtggcgtgaaatcacgcgttataaaatgcacaacgcgctgtctccatcatttaacttttcacgtggcgtgaatcacttccaactgcgtaccaatccgaccaccagtacgtacatgacgcacgaagcggaggatgaactgctgcgtagcgcattgcataaattcaccaatgtcgactatactaatggccgtacagtgttgccgttcccacatgatatgttttatgtgccggaatttcgcaagtatgacgaaatgtcatattccgaacgcattgaccagatccgcgacgaactgtctttgaacgaacgctctagtttagaggctttcattttattatgtagcggtggcaccctggaaaactccagctttggtgaatttctgcattggtgggcaatgtcgggttacacgtatcagggctgtatggattgtttaatctcctataaatttaaggatggccagagtgcgttcgcgcgtcgcttctgggaagaagccgctggcactggccgtctgggctatgtctttggttgtccggtgcgttctgtggtgaacgaacgcgacgcagtacgtgttaccgcacgtgacggtcgcgaattcgcagcgaaacgtttggtttgcacgattccgctgaacgtattgagttctgttcattttagcccaccactgtccccgcaacgcatggccgctgcgaacattggccatgttaaccagtgcgtcaaagtgcatgcggaagtcagttgtccggatatgcgttcatggtcgggtatctcctatccgttcaacaaattagcctacgctatcggcgatggcacgaccccagcgggtaatacgcatattgtgtgccttgggggggcccataatcatatccagccggaagaggacgtggaagcaacgaagatggccgttgaaaacatgtcgcctgggaatatggatatcaaacgtctggtcttccacaactggtgcaaggatgaatttgccaaaggcgcgtggttcttcgcccctccacagctgctgtcaaagagcctggatgaactgcgctgccgtcacggtaatgtcctgtttgcaaactccgattgggccttaggttggcgtggttttatcgatggtgctatcgaggagggcacccgcgcagcggttactgtaattgaggaactgcgtcctgcgcctgcggtgcgttcccacctg

SEQ ID NO: 366 - protein, 495 aa, synthetic construct
  REGION 1..495: note = Variant of monoamine oxidase
MTSRDGYQWTPETGLTQGVPSLGVISPPTNIEDTDKDGPWDVIVIGGGYCGLTATRDLTVAGFKTLLLEARDRIGGRSWSSNIDGYPYEMGGTWVHWHQSHVWREITRYKMHNALSPSFNFSRGVNHFQLRTNPTTSTYMTHEAEDELLRSALHKFTNVDYTNGRTVLPFPHDMFYVPEFRKYDEMSYSERIDQIRDELSLNERSSLEAFILLCSGGTLENSSFGEFLHWWAMSGYTYQGCMDCLISYKFKDGQSAFARRFWEEAAGTGRLGYVFGCPVRSVVNERDAVRVTARDGREFAAKRLVCTIPLNVLSSVHFSPPLSPQRMAAANIGHVNQCVKVHAEVSCPDMRSWSGISYPFNKLAYAIGDGTTPAGNTHIVCLGGAHNHIQPEEDVEATKMAVENMSPGNMDIKRLVFHNWCKDEFAKGAWFFAPPQLLSKSLDELRCRHGNVLFANSDWALGWRGFIDGAIEEGTRAAVTVIEELRPAPAVRSHL

SEQ ID NO: 367 - DNA, 1485 bp, synthetic construct
  misc_feature 1..1485: note = Variant of monoamine oxidase
  source 1..1485: mol_type = other DNA
atgaccagccgcgacggctatcagtggaccccggaaacgggtctgacccagggcgtaccgtccctgggtgtcatttcgccgccgactaacatcgaagataccgataaggacgggccttgggatgtcattgtcattgggggcgggtattgtgggctgaccgcaacccgtgatttaaccgtcgcagggttcaagacgctgctgctggaggcccgtgatcgtattggtggccgctcctggagcagtaatattgacggttacccgtatgagatgggtggcacttgggttcattggcatcaatctcacgtgtggcgtgaaatcacgcgttataaaatgcacaacgcgctgtctccatcatttaacttttcacgtggcgtgaatcacttccaactgcgtaccaatccgaccaccagtacgtacatgacgcacgaaatggaggatgaactgctgcgtagcgcattgcataaattcaccaatgtcgacggcactaatggccgtacagtgttgccgttcccacatgatatgttttatgtgccggaatttcgcaagtatgacgaaatgtcatattccgaacgcattgaccagatccgcgacgaactgtctttgaacgaacgctctagtttagaggctttcattttattatgtagcggtggcaccctggaaaactccagctttggtgaatttctgcattggtgggcaatgtcgggttacacgtatcagggctgtatggattgtttaatctcctataaatttaaggatggccagagtgcgttcgcgcgtcgcttctgggaagaagccgctggcactggccgtctgggctatgtctttggttgtccggtgcgttctgtggtgaacgaacgcgacgcagtacgtgttaccgcacgtgacggtcgcgaattcgcagcgaaacgtttggtttgcacgattccgctgaacgtattgagttctgttcattttagcccaccactgtccccgcaacgcatggccgctgcgaacattggccatgttaaccagtgcgtcaaagtgcatgcggaagtcagttgtccggatatgcgttcatggtcgggtatctcctatccgttcaacaaattagcctacgctatcggcgatggcacgaccccagcgggtaatacgcatattgtgtgccttgggggggcccataatcatatccagccggaagaggacgtggaagcaacgaagatggccgttgaaaacatgtcgcctgggaatatggatatcaaacgtctggtcttccacaactggtgcaaggatgaatttgccaaaggcgcgtggttcttcgcccctccacagctgctgtcaaagagcctggatgaactgcgctgccgtcacggtaatgtcctgtttgcaaactccgattgggccttaggttggcgtggttttatcgatggtgctatcgaggagggcacccgcgcagcggttactgtaattgaggaactgcgtcctgcgcctgcggtgcgttcccacctg

SEQ ID NO: 368 - protein, 495 aa, synthetic construct
  REGION 1..495: note = Variant of monoamine oxidase
MTSRDGYQWTPETGLTQGVPSLGVISPPTNIEDTDKDGPWDVIVIGGGYCGLTATRDLTVAGFKTLLLEARDRIGGRSWSSNIDGYPYEMGGTWVHWHQSHVWREITRYKMHNALSPSFNFSRGVNHFQLRTNPTTSTYMTHEMEDELLRSALHKFTNVDGTNGRTVLPFPHDMFYVPEFRKYDEMSYSERIDQIRDELSLNERSSLEAFILLCSGGTLENSSFGEFLHWWAMSGYTYQGCMDCLISYKFKDGQSAFARRFWEEAAGTGRLGYVFGCPVRSVVNERDAVRVTARDGREFAAKRLVCTIPLNVLSSVHFSPPLSPQRMAAANIGHVNQCVKVHAEVSCPDMRSWSGISYPFNKLAYAIGDGTTPAGNTHIVCLGGAHNHIQPEEDVEATKMAVENMSPGNMDIKRLVFHNWCKDEFAKGAWFFAPPQLLSKSLDELRCRHGNVLFANSDWALGWRGFIDGAIEEGTRAAVTVIEELRPAPAVRSHL

SEQ ID NO: 369 - DNA, 1485 bp, synthetic construct
  misc_feature 1..1485: note = Variant of monoamine oxidase
  source 1..1485: mol_type = other DNA
atgaccagccgcgacggctatcagtggaccccggaaacgggtctgacccagggcgtaccgtccctgggtgtcatttcgccgccgactaacatcgaagataccgataaggacgggccttgggatgtcattgtcattgggggcgggtattgtgggctgaccgcaacccgtgatttaaccgtcgcagggttcaagacgctgctgctggaggcccgtgatcgtattggtggccgctcctggagcagtaatattgacggttacccgtatgagatgggtggcacttgggttcattggcatcaatctcacgtgtggcgtgaaatcacgcgttataaaatgcacaacgcgctgtctccatcatttaacttttcacgtggcgtgaatcacttccaactgcgtaccaatccgaccaccagtacgtacatgacgcacgaagcggaggatgaactgctgcgtagcgcattgcataaattcaccaatgtcgacggcactaatggccgtacagtgttgccgttcccacatgatatgttttatgtgccggaatttcgcaagtatgacgaaatgtcatattccgaacgcattgaccagatccgcgacgaactgtctttgaacgaacgctctagtttagaggctttcattttattatgtagcggtggcaccctggaaaactccagctttggtgaatttctgcattggtgggcaatgtcgggttacacgtatcagggctgtatggattgtttaatctcctataaatttaaggatggccagagtgcgttcgcgcgtcgcttctgggaagaagccgctggcactggccgtctgggctatgtctttggtacgccggtgcgttctgtggtgaacgaacgcgacgcagtacgtgttaccgcacgtgacggtcgcgaattcgcagcgaaacgtttggtttgcacgattccgctgaacgtattgagttctgttcattttagcccaccactgtccccgcaacgtatggccgctgcgaacattggccatgttaaccagtgcgtcaaagtgcatgcggaagtcagttgtccggatatgcgttcatggtcgggtatctcctatccgttcaacaaattagcctacgctatcggcgatggcacgaccccagcgggtaatacgcatattgtgtgccttgggggggcccataatcatatccagccggaagaggacgtggaagcaacgaagatggccgttgaaaacatgtcgcctgggaatatggatatcaaacgtctggtcttccacaactggtgcaaggatgaatttgccaaaggcgcgtggttcttcgcccctccacaactgctgtcaaagagcctggatgaactgcgctgccgtcacggtaatgtcctgtttgcaaactccgattgggccttaggttggcgtggttttatcgatggtgctatcgaggagggcacccgcgcagcggttactgtaattgaggaactgcgtcctgcgcctgcggtgcgttcccacctg

SEQ ID NO: 370 - protein, 495 aa, synthetic construct
  REGION 1..495: note = Variant of monoamine oxidase
MTSRDGYQWTPETGLTQGVPSLGVISPPTNIEDTDKDGPWDVIVIGGGYCGLTATRDLTVAGFKTLLLEARDRIGGRSWSSNIDGYPYEMGGTWVHWHQSHVWREITRYKMHNALSPSFNFSRGVNHFQLRTNPTTSTYMTHEAEDELLRSALHKFTNVDGTNGRTVLPFPHDMFYVPEFRKYDEMSYSERIDQIRDELSLNERSSLEAFILLCSGGTLENSSFGEFLHWWAMSGYTYQGCMDCLISYKFKDGQSAFARRFWEEAAGTGRLGYVFGTPVRSVVNERDAVRVTARDGREFAAKRLVCTIPLNVLSSVHFSPPLSPQRMAAANIGHVNQCVKVHAEVSCPDMRSWSGISYPFNKLAYAIGDGTTPAGNTHIVCLGGAHNHIQPEEDVEATKMAVENMSPGNMDIKRLVFHNWCKDEFAKGAWFFAPPQLLSKSLDELRCRHGNVLFANSDWALGWRGFIDGAIEEGTRAAVTVIEELRPAPAVRSHL

SEQ ID NO: 371 - DNA, 1485 bp, synthetic construct
  misc_feature 1..1485: note = Variant of monoamine oxidase
  source 1..1485: mol_type = other DNA
atgaccagccgcgacggctatcagtggaccccggaaacgggtctgacccagggcgtaccgtccctgggtgtcatttcgccgccgactaacatcgaggataccgataaggacgggccttgggatgtcattgtcattgggggcgggtattgtgggctgaccgcaacccgtgatttaaccgtcgcagggttcaagacgctgctgctggaggcccgtgatcgtattggtggccgctcctggagcagtaatattgacggttacccgtatgagatgggtggcacttgggttcattggcatcaatctcacgtgtggcgtgaaatcacgcgttataaaatgcacaacgcgctgtctccatcatttaacttttcacgtggcgtgaatcacttccaactgcgtaccaatccgaccaccagtacgtacatgacgcacgaagcggaggatgaactgctgcgtagcgcattgcataaattcaccaatgtcgacggcactaatggccgtacagtgttgccgttcccacatgatatgttttatgtgccggaatttcgcaagtatgacgaaatgtcatattccgaacgcattgaccagatccgcgacgaactgtctttgaacgaacgctctagtttagaggctttcattttattatgtagcggtggcaccctggaaaactccagctttggtgaatttctgcattggtgggcaatgtcgggttacacgtatcagggctgtatggattgtttaatctcctataaatttaaggatggccagagtgcgttcgcgcgtcgcttctgggaagaagccgctggcactggccgtctgggctatgtctttggttgtccggtgcgttctgtggtggacgaacgcgacgcagtacgtgttaccgcacgtgacggtcgcgaattcgcagcgaaacgtttggtttgcacgattccgctgaacgtattgagttctgttcattttagcccaccactgtccccgcaacgcatggccgctgcgaacattggccatgttaaccagtgcgtcaaagtgcatgcggaagtcagttgtccggatatgcgttcatggtcgggtatctcctatccgttcaacaaattagcctacgctatcggcgatggcacgaccccagcgggtaatacgcatattgtgtgccttgggggggcgcataatcatatccagccggaagaggacgtggaagcaacgaagatggccgttgaaaacatgtcgcctgggaatatggatatcaaacgtctggtcttccacaactggtgcaaggatgaatttgccaaaggcgcgtggttcttcgcccctccacagctgctgtcaaagagcctggatgaactgcgctgccgtcacggtaatgtcctgtttgcaaactccgattgggccttaggttggcgtggttttatcgatggtgctatcgaggagggcacccgcgcagcggttactgtaattgaggaactgcgtcctgcgcctgcggtgcgttcccacctg

SEQ ID NO: 372 - protein, 495 aa, synthetic construct
  REGION 1..495: note = Variant of monoamine oxidase
MTSRDGYQWTPETGLTQGVPSLGVISPPTNIEDTDKDGPWDVIVIGGGYCGLTATRDLTVAGFKTLLLEARDRIGGRSWSSNIDGYPYEMGGTWVHWHQSHVWREITRYKMHNALSPSFNFSRGVNHFQLRTNPTTSTYMTHEAEDELLRSALHKFTNVDGTNGRTVLPFPHDMFYVPEFRKYDEMSYSERIDQIRDELSLNERSSLEAFILLCSGGTLENSSFGEFLHWWAMSGYTYQGCMDCLISYKFKDGQSAFARRFWEEAAGTGRLGYVFGCPVRSVVDERDAVRVTARDGREFAAKRLVCTIPLNVLSSVHFSPPLSPQRMAAANIGHVNQCVKVHAEVSCPDMRSWSGISYPFNKLAYAIGDGTTPAGNTHIVCLGGAHNHIQPEEDVEATKMAVENMSPGNMDIKRLVFHNWCKDEFAKGAWFFAPPQLLSKSLDELRCRHGNVLFANSDWALGWRGFIDGAIEEGTRAAVTVIEELRPAPAVRSHL

SEQ ID NO: 373 - DNA, 1485 bp, synthetic construct
  misc_feature 1..1485: note = Variant of monoamine oxidase
  source 1..1485: mol_type = other DNA
atgaccagccgcgacggctatcagtggaccccggaaacgggtctgacccagggcgtaccgtccctgggtgtcatttcgccgccgactaacatcgaagataccgataaggacgggccttgggatgtcattgtcattgggggcgggtattgtgggctgaccgcaacccgtgatttaaccgtctgtgggttcaagacgctgctgctggaggcccgtgatcgtattggtggccgctcctggagcagtaatattgacggttacccgtatgagatgggtggcacttgggttcattggcatcaatctcacgtgtggcgtgaaatcacgcgttataaaatgcacaacgcgctgtctccatcatttaacttttcacgtggcgtgaatcacttccaactgcgtaccaatccgaccaccagtacgtacatgacgcacgaagcggaggatgaactgctgcgtagcgcattgcataaattcaccaatgtcgacggcactaatggccgtacagtgttgccgttcccacatgatatgttttatgtgccggaatttcgcaagtatgacgaaatgtcatattccgaacgcattgaccagatccgcgacgaactgtctttgaacgaacgctctagtttagaggctttcattttattatgtagcggtggcaccctggaaaactccagctttggtgaatttctgcattggtgggcaatgtcgggttacacgtatcagggctgtatggattgtttaatctcctataaatttaaggatggccagagtgcgttcgcgcgtcgcttctgggaagaagccgctggcactggccgtctgggctatgtctttggttgtccggtgcgttctgtggtgaacgaacgcgacgcagtacgtgttaccgcacgtgacggtcgcgaattcgcagcgaaacgtttggtttgcacgattccgctgaacgtattgagttctgttcattttagcccaccactgtccccgcaacgcatggccgctgcgaacattggccatgttaaccagtgcgtcaaagtgcatgcggaagtcagttgtccggatatgcgttcatggtcgggtatctcctatccgttcaacaaattagcctacgctatcggcgatggcacgaccccagcgggtaatacgcatattgtgtgccttgggggggcccataatcatatccagccggaagaggacgtggaagcaacgaagatggccgttgaaaacatgtcgcctgggaatatggatatcaaacgtctggtcttccacaactggtgcaaggatgaatttgccaaaggcgcgtggttcttcgcccctccacagctgctgtcaaagagcctggatgaactgcgctgccgtcacggtaatgtcctgtttgcaaactccgattgggccttaggttggcgtggttttatcgatggtgctatcgaggagggcacccgcgcagcggttactgtaattgaggaactgcgtcctgcgcctgcggtgcgttcccacctg

SEQ ID NO: 374 - protein, 495 aa, synthetic construct
  REGION 1..495: note = Variant of monoamine oxidase
MTSRDGYQWTPETGLTQGVPSLGVISPPTNIEDTDKDGPWDVIVIGGGYCGLTATRDLTVCGFKTLLLEARDRIGGRSWSSNIDGYPYEMGGTWVHWHQSHVWREITRYKMHNALSPSFNFSRGVNHFQLRTNPTTSTYMTHEAEDELLRSALHKFTNVDGTNGRTVLPFPHDMFYVPEFRKYDEMSYSERIDQIRDELSLNERSSLEAFILLCSGGTLENSSFGEFLHWWAMSGYTYQGCMDCLISYKFKDGQSAFARRFWEEAAGTGRLGYVFGCPVRSVVNERDAVRVTARDGREFAAKRLVCTIPLNVLSSVHFSPPLSPQRMAAANIGHVNQCVKVHAEVSCPDMRSWSGISYPFNKLAYAIGDGTTPAGNTHIVCLGGAHNHIQPEEDVEATKMAVENMSPGNMDIKRLVFHNWCKDEFAKGAWFFAPPQLLSKSLDELRCRHGNVLFANSDWALGWRGFIDGAIEEGTRAAVTVIEELRPAPAVRSHL

SEQ ID NO: 375 - DNA, 1485 bp, synthetic construct
  misc_feature 1..1485: note = Variant of monoamine oxidase
  source 1..1485: mol_type = other DNA
atgaccagccgcgacggctatcagtggaccccggaaacgggtctgacccagggcgtaccgtccctgggtgtcatttcgccgccgactaacatcgaagataccgataaggacgggccttgggatgtcattgtcattgggggcgggtattgtgggctgaccgcaacccgtgatttaaccgtcgcagggttcaagacgctgctgctggaggcccgtgatcgtattggtggccgctcctggagcagtaatattgacggttacccgtatgagatgggtggcacttgggttcattggcatcaatctcacgtgtggcgtgaaatcacgcgttataaaatgcacaacgcgctgtctccatcatttaacttttcacgtggcgtgaatcacttccaactgcgtaccaatccgaccaccagtacgtacatgacgcacgaagcggaggatgaactgctgcgtagcgcattgcataaattcaccaatgtcgacggcactaatggccgtacagtgttgccgttcccacatgatatgttttatgtgccggaatttcgcaagtatgacgaaatgtcatattccgaacgcattgaccagatccgcgacgaactgtctttgaacgaacgctctagtttagaggctttcattttattatgtagcggtggcaccctggaaaactccagctttggtgaatttctgcattggtgggcaatgtcgggttacacgtatcagggctgtatggattgtttaatctcctataaatttaaggatggccagagtgcgttcgcgcgtcgcttctgggaagaagccgctggcactggccgtctgggctatgtctttggttgtccggtgcgttctgtggtgaacgaacgcgacgcagtacgtgttaccgcagttgacggtcgcgaattcgcagcgaaacgtttggtttgcacgattccgctgaacgtattgagttctgttcattttagcccaccactgtccccgcaacgcatggccgctgcgaacattggccatgttaaccagtgcgtcaaagtgcatgcggaagtcagttgtccggatatgcgttcatggtcgggtatctcctatccgttcaacaaattagcctacgctatcggcgatggcacgaccccagcgggtaatacgcatattgtgtgccttgggggggcccataatcatatccagccggaagaggacgtggaagcaacgaagatggccgttgaaaacatgtcgcctgggaatatggatatcaaacgtctggtcttccacaactggtgcaaggatgaatttgccaaaggcgcgtggttcttcgcccctccacagctgctgtcaaagagcctggatgaactgcgctgccgtcacggtaatgtcctgtttgcaaactccgattgggccttaggttggcgtggttttatcgatggtgctatcgaggagggcacccgcgcagcggttactgtaattgaggaactgcgtcctgcgcctgcggtgcgttcccacctg

SEQ ID NO: 376 - protein, 495 aa, synthetic construct
  REGION 1..495: note = Variant of monoamine oxidase
MTSRDGYQWTPETGLTQGVPSLGVISPPTNIEDTDKDGPWDVIVIGGGYCGLTATRDLTVAGFKTLLLEARDRIGGRSWSSNIDGYPYEMGGTWVHWHQSHVWREITRYKMHNALSPSFNFSRGVNHFQLRTNPTTSTYMTHEAEDELLRSALHKFTNVDGTNGRTVLPFPHDMFYVPEFRKYDEMSYSERIDQIRDELSLNERSSLEAFILLCSGGTLENSSFGEFLHWWAMSGYTYQGCMDCLISYKFKDGQSAFARRFWEEAAGTGRLGYVFGCPVRSVVNERDAVRVTAVDGREFAAKRLVCTIPLNVLSSVHFSPPLSPQRMAAANIGHVNQCVKVHAEVSCPDMRSWSGISYPFNKLAYAIGDGTTPAGNTHIVCLGGAHNHIQPEEDVEATKMAVENMSPGNMDIKRLVFHNWCKDEFAKGAWFFAPPQLLSKSLDELRCRHGNVLFANSDWALGWRGFIDGAIEEGTRAAVTVIEELRPAPAVRSHL

SEQ ID NO: 377 - DNA, 1485 bp, synthetic construct
  misc_feature 1..1485: note = Variant of monoamine oxidase
  source 1..1485: mol_type = other DNA
atgaccagccgcgacggctatcagtggaccccggaaacgggtctgacccagggcgtaccgtccctgggtgtcatttcgccgccgactaacatcgaagataccgataaggacgggccttgggatgtcattgtcattgggggcgggtattgtgggctgaccgcaacccgtgatttaaccgtcgcagggttcaagacgctgctgctggaggcccgtgatcgtattggtggccgctcctggagcagtaatattgacggttacccgtatgagatgggtggcacttgggttcattggcatcaatctcacgtgtggcgtgaaatcacgcgttataaaatgcacaacgcgctgtctccatcatttaacttttcacgtggcgtgaatcacttccaactgcgtaccaatccgaccaccagtacgtacatgacgcacgaagcggaggatgaactgctgcgtagcgcattgcataaattcaccaatgtcgacggcactaatggccgtacagtgttgccgttcccacatgatatgttttatgtgccggaatttcgcaagtatgacaggatgtcatattccgaacgcattgaccagatccgcgacgaactgtctttgaacgaacgctctagtttagaggctttcattttattatgtagcggtggcaccctggaaaactccagctttggtgaatttctgcattggtgggcaatgtcgggttacacgtatcagggctgtatggattgtttaatctcctataaatttaaggatggccagagtgcgttcgcgcgtcgcttctgggaagaagccgctggcactggccgtctgggctatgtctttggttgtccggtgcgttctgtggtgaacgaacgcgacgcagtacgtgttaccgcacgtgacggtcgcgaattcgcagcgaaacgtttggtttgcacgattccgctgaacgtattgagttctgttcattttagcccaccactgtccccgcaacgcatggccgctgcgaacattggccatgttaaccagtgcgtcaaagtgcatgcggaagtcagttgtccggatatgcgttcatggtcgggtatctcctatccgttcaacaaattagcctacgctatcggcgatggcacgaccccagcgggtaatacgcatattgtgtgccttgggggggcccataatcatatccagccggaagaggacgtggaagcaacgaagatggccgttgaaaacatgtcgcctgggaatatggatatcaaacgtctggtcttccacaactggtgcaaggatgaatttgccaaaggcgcgtggttcttcgcccctccacagctgctgtcaaagagcctggatgaactgcgctgccgtcacggtaatgtcctgtttgcaaactccgattgggccttaggttggcgtggttttatcgatggtgctatcgaggagggcacccgcgcagcggttactgtaattgaggaactgcgtcctgcgcctgcggtgcgttcccacctg

SEQ ID NO: 378 - protein, 495 aa, synthetic construct
  REGION 1..495: note = Variant of monoamine oxidase
MTSRDGYQWTPETGLTQGVPSLGVISPPTNIEDTDKDGPWDVIVIGGGYCGLTATRDLTVAGFKTLLLEARDRIGGRSWSSNIDGYPYEMGGTWVHWHQSHVWREITRYKMHNALSPSFNFSRGVNHFQLRTNPTTSTYMTHEAEDELLRSALHKFTNVDGTNGRTVLPFPHDMFYVPEFRKYDRMSYSERIDQIRDELSLNERSSLEAFILLCSGGTLENSSFGEFLHWWAMSGYTYQGCMDCLISYKFKDGQSAFARRFWEEAAGTGRLGYVFGCPVRSVVNERDAVRVTARDGREFAAKRLVCTIPLNVLSSVHFSPPLSPQRMAAANIGHVNQCVKVHAEVSCPDMRSWSGISYPFNKLAYAIGDGTTPAGNTHIVCLGGAHNHIQPEEDVEATKMAVENMSPGNMDIKRLVFHNWCKDEFAKGAWFFAPPQLLSKSLDELRCRHGNVLFANSDWALGWRGFIDGAIEEGTRAAVTVIEELRPAPAVRSHL

SEQ ID NO: 379 - DNA, 1485 bp, synthetic construct
  misc_feature 1..1485: note = Variant of monoamine oxidase
  source 1..1485: mol_type = other DNA
atgaccagccgcgacggctatcagtggaccccggaaacgggtctgacccagggcgtaccgtccctgggtgtcatttcgccgccgactaacatcgaagataccgataaggacgggccttgggatgtcattgtcattgggggcgggtattgtgggctgaccgcaacccgtgatttaaccgtcgcagggttcaagacgctgctgctggaggcccgtgatcgtattggtggccgctcctggagcagtaatattgacggttacccgtatgagatgggtggcacttgggttcattggcatcaatctcacgtgtggcgtgaaatcacgcgttataaaatgcacaacgcgctgtctccatcatttaacttttcacgtggcgtgaatcacttccaactgcgtaccaatccgaccaccagtacgtacatgacgcacgaagcggaggatgaactgctgcgtagcgcattgcataaattcaccaatgtcgacggcactaatggccgtacagtgttgccgttcccacatgatatgttttatgtgccggaatttcgcaagtatgacgaaatgtcatattccgaacgcattgaccagatccgcgacgaactgtctttgaacgaacgctctagtttagaggctttcattttattatgtagcggtggcaccctggaaaactccagctttggtgaatttctgcattggtgggcaatgtcgggttacacgtatcagggctgtatggattgtttaatctcctataaatttaaggatggccagagtgcgttcgcgcgtcgcttctgggaagaagccgctggcactggccgtctgggctatgtctttggttgtccggtgcgttctgtggtgaacgaacgcgacgcagtacgtgttaccgcacgtgacggtcgcgaattcgcagcgaaacgtttggtttgcacgattccgctgaacgtattgagttctgttcattttagcccaccactgtccccgcaacgcatggccgctgcgaacattggccatgttaaccagtgcgtcaaagtgcatgcggaagtcagttgtccggagatgcgttcatggtcgggtatctcctatccgttcaacaaattagcctacgctatcggcgatggcacgaccccagcgggtaatacgcatattgtgtgccttgggggggcccataatcatatccagccggaagaggacgtggaagcaacgaagatggccgttgaaaacatgtcgcctgggaatatggatatcaaacgtctggtcttccacaactggtgcaaggatgaatttgccaaaggcgcgtggttcttcgcccctccacagctgctgtcaaagagcctggatgaactgcgctgccgtcacggtaatgtcctgtttgcaaactccgattgggccttaggttggcgtggttttatcgatggtgctatcgaggagggcacccgcgcagcggttactgtaattgaggaactgcgtcctgcgcctgcggtgcgttcccacctg

SEQ ID NO: 380 - protein, 495 aa, synthetic construct
  REGION 1..495: note = Variant of monoamine oxidase
MTSRDGYQWTPETGLTQGVPSLGVISPPTNIEDTDKDGPWDVIVIGGGYCGLTATRDLTVAGFKTLLLEARDRIGGRSWSSNIDGYPYEMGGTWVHWHQSHVWREITRYKMHNALSPSFNFSRGVNHFQLRTNPTTSTYMTHEAEDELLRSALHKFTNVDGTNGRTVLPFPHDMFYVPEFRKYDEMSYSERIDQIRDELSLNERSSLEAFILLCSGGTLENSSFGEFLHWWAMSGYTYQGCMDCLISYKFKDGQSAFARRFWEEAAGTGRLGYVFGCPVRSVVNERDAVRVTARDGREFAAKRLVCTIPLNVLSSVHFSPPLSPQRMAAANIGHVNQCVKVHAEVSCPEMRSWSGISYPFNKLAYAIGDGTTPAGNTHIVCLGGAHNHIQPEEDVEATKMAVENMSPGNMDIKRLVFHNWCKDEFAKGAWFFAPPQLLSKSLDELRCRHGNVLFANSDWALGWRGFIDGAIEEGTRAAVTVIEELRPAPAVRSHL

SEQ ID NO: 381 - DNA, 1485 bp, synthetic construct
  misc_feature 1..1485: note = Variant of monoamine oxidase
  source 1..1485: mol_type = other DNA
atgaccagccgcgacggctatcagtggaccccggaaacgggtctgacccagggcgtaccgtccctgggtgtcatttcgccgccgactaacatcgaagataccgataaggacgggccttgggatgtcattgtcattgggggcgggtattgtgggctgaccgcaactcgtgatttaaccgtcgcagggttcaagacgctgctgctggaggcccgtgatcgtattggtggccgctcctggagcagtaatattgacggttacccgtatgagatgggtggcacttgggttcattggcatcaatctcacgtgtggcgtgaaatcacgcgttataaaatgcacaacgcgctgtctccatcatttaatttttcacgtggcgtgaatcacttccaactgcgtaccaatccgaccaccagtacgtacatgacgcacgaagcggaggatgaactgctgcgtagcgcattgcataaattcaccaatgtcgacggcactaatggccgtacagtgttgccgttcccacatgatatgttttatgtgccggaatttcgcaagtatgacgaaatgtcatattccgaacgcattgaccagatccgcgacgaactgtctttgaacgaacgctctagtttagaggctttcattttattatgtagcggtggcaccctggaaaactccagctttggtgaatttctgcattggtgggcaatgtcgggttacacgtatcagggctgtatggattgtttaatctcctataaatttaaggatggccagagtgcgttcgcgcgtcgcttctgggaagaagccgctggcactggccgtctgggctatgtctttggtacgccggtgcgttctgtggtgaacgaacgcgacgcagtacgtgttaccgcacgtgacggtcgcgaattcgcagcgaaacgtttggtttgcacgattccgctgaacgtattgagttctgttcattttagcccaccactgtccccgcaacgcatggccgctgcgaacattggccatgttaaccagtgcgtcaaagtgcatgcggaagtcagtgatccagatatgcgttcatggtcgggtatctcctatccgttcaacaaattagcctacgctatcggcgatggcacgaccccagcgggtaatacgcatattgtgtgccttgggggggcccataatcatatccagccggaagaggacgtggaagcaacgaagatggccgttgaaaacatgtcgcctgggaatatggatatcaaacgtctggtcttccacaactggtgcaaggatgaatttgccaaaggcgcgtggttcttcgcccctccacaactgctgtcaaagagcctggatgaactgcgctgccgtcacggtaatgtcctgtttgcaaactccgattgggccttaggttggcgtggttttatcgatggtgctatcgaggagggcacccgcgcagcggttactgtaattgaggaactgcgtcctgcgcctgcggtgcgttcccacctg

SEQ ID NO: 382 - protein, 495 aa, synthetic construct
  REGION 1..495: note = Variant of monoamine oxidase
MTSRDGYQWTPETGLTQGVPSLGVISPPTNIEDTDKDGPWDVIVIGGGYCGLTATRDLTVAGFKTLLLEARDRIGGRSWSSNIDGYPYEMGGTWVHWHQSHVWREITRYKMHNALSPSFNFSRGVNHFQLRTNPTTSTYMTHEAEDELLRSALHKFTNVDGTNGRTVLPFPHDMFYVPEFRKYDEMSYSERIDQIRDELSLNERSSLEAFILLCSGGTLENSSFGEFLHWWAMSGYTYQGCMDCLISYKFKDGQSAFARRFWEEAAGTGRLGYVFGTPVRSVVNERDAVRVTARDGREFAAKRLVCTIPLNVLSSVHFSPPLSPQRMAAANIGHVNQCVKVHAEVSDPDMRSWSGISYPFNKLAYAIGDGTTPAGNTHIVCLGGAHNHIQPEEDVEATKMAVENMSPGNMDIKRLVFHNWCKDEFAKGAWFFAPPQLLSKSLDELRCRHGNVLFANSDWALGWRGFIDGAIEEGTRAAVTVIEELRPAPAVRSHL

SEQ ID NO: 383 - DNA, 1485 bp, synthetic construct
  misc_feature 1..1485: note = Variant of monoamine oxidase
  source 1..1485: mol_type = other DNA
atgaccagccgcgacggctatcagtggaccccggaaacgggtctgacccagggcgtaccgtccctgggtgtcatttcgccgccgactaacatcgaggataccgataaggacgggccttgggatgtcattgtcattgggggcgggtattgtgggctgaccgcaacccgtgatttaaccgtcgcagggttcaaggtactgctgctggaggcccgtgatcgtattggtggccgctcctggagcagtaatattgacggttacccgtatgagatgggtggcacttgggttcattggcatcaatctcacgtgtggcgtgaaatcacgcgttataaaatgcacaacgcgctgtctccatcatttaacttttcacgtggcgtgaatcacttccaactgcgtaccaatccgactaccagtacgtacatgacgcacgaagcggaggatgaactgctgcgtagcgcattgcataaattcaccaatgtcgacggcactaatggccgtacagtgttgccgttcccacatgatatgttttatgtgccggaatttcgcaagtatgacgaaatgtcatattccgaacgcattgaccagatccgcgacgaactgtctttgaacgaacgctctagtttagaggctttcattttattatgtagcggtggcaccctggaaaactccagctttggtgaatttctgcattggtgggcaatgtcgggttacacgtatcagggctgtatggattgtttaatgtcctataaatttaaggatggccagagtgcgttcgcgcgtcgcttctgggaagaagccgctggcactggccgtctgggctatgtctttggttgtccggtgcgttctgtggtgaacgaacgcgacgcagtacgtgttaccgcacgtgacggtcgcgaattcgcagcgaaacgtttggtttgcacgattccgctgaacgtattgagttctgttcattttagcccaccactgtccccgcaacgcatggccgctgcgaacattggccatgttaatcagtgcgtcaaagtgcatgcggaagtcagttgtccggatatgcgttcatggtcgggtatctcctatccgttcaacaaattagcctacgctatcggcgatggcacgaccccagcgggtaatacgcatattgtgtgccttgggggggcgcataatcatatccagccggaagaggacgtggaagcaacgaagatggccgttgaaaacatgtcgcctgggaatatggatatcaaacgtctggtcttccacaactggtgcaaggatgaatttgccaaaggcgcgtggttcttcgcccctccacagctgctgtcaaagagcctggatgaactgcgctgccgtcacggtaatgtcctgtttgcaaactccgattgggccttaggttggcgtggttttatcgatggtgctatcgaggagggcacccgcgcagcggttactgtaattgaggaactgcgtcctgcgcctgcggtgcgttcccacctg

SEQ ID NO: 384 - protein, 495 aa, synthetic construct
  REGION 1..495: note = Variant of monoamine oxidase
MTSRDGYQWTPETGLTQGVPSLGVISPPTNIEDTDKDGPWDVIVIGGGYCGLTATRDLTVAGFKVLLLEARDRIGGRSWSSNIDGYPYEMGGTWVHWHQSHVWREITRYKMHNALSPSFNFSRGVNHFQLRTNPTTSTYMTHEAEDELLRSALHKFTNVDGTNGRTVLPFPHDMFYVPEFRKYDEMSYSERIDQIRDELSLNERSSLEAFILLCSGGTLENSSFGEFLHWWAMSGYTYQGCMDCLMSYKFKDGQSAFARRFWEEAAGTGRLGYVFGCPVRSVVNERDAVRVTARDGREFAAKRLVCTIPLNVLSSVHFSPPLSPQRMAAANIGHVNQCVKVHAEVSCPDMRSWSGISYPFNKLAYAIGDGTTPAGNTHIVCLGGAHNHIQPEEDVEATKMAVENMSPGNMDIKRLVFHNWCKDEFAKGAWFFAPPQLLSKSLDELRCRHGNVLFANSDWALGWRGFIDGAIEEGTRAAVTVIEELRPAPAVRSHL

SEQ ID NO: 385 - DNA, 1485 bp, synthetic construct
  misc_feature 1..1485: note = Variant of monoamine oxidase
  source 1..1485: mol_type = other DNA
atgaccagccgcgacggctatcagtggaccccggaaacgggtctgacccagggcgtaccgtccctgggtgtcatttcgccgccgactaacatcgaagataccgataaggacgggccttgggatgtcattgtcattgggggcgggtattgtgggctgaccgcaacccgtgatttaaccgtcgcagggttcaagacgctgctgctggaggcccgtgatcgtattggtggccgctcctggagcagtaatattgacggttacccgtatgagatgggtggcacttgggttcattggcatcaatctcacgtgtggcgtgaaatcacgcgttataaaatgcacaacgcgctgtctccatcatttaacttttcacgtggcgtgaatcacttccaactgcgtaccaatccgaccaccagtacgtacatgacgcacgaagcggaggatgaactgctgcgtagcgcattgcataaattcaccaatgtcgacggcactaatggccgtacagtgttgccgttcccacatgatatgttttatgtgccggaatttcgcaagtatgacgaaatgtcatattccgaacgcattgaccagatccgcgacgaactgtctttgaacgaacgctctagtttagaggctttcattttattatgtagcggtggcaccctggaaaactccagctttggtgaatttctgcattggtgggcaatgtcgggttacacgtatcagggctgtatggattgtttaatctcctataaatttaaggatggccagagtgcgttcgcgcgtcgcttctgggaagaagccgctggcactggccgtctgggctatgtctttggttgtccggtgcgttctgtggtgaacgaacgcgacgcagtacgtgttaccgcacgtgacggtcgcgaattcgcagcgaaacgtttggtttgcacgattccgctgaacgtattgagttctgttcattttagcccaccactgtccccgcaacgcatggccgctgcgaacattggccatgttaaccagtgcgtcaaagtgcatgcggaagtcagttgtccggatatgcgttcatggtcgggtatctcctatccgttcaacaaattagcctacgctatcggcgatggcacgaccccagcgggtaatacgcatattgtgtgccttgggggggcccataatcatatccagccggaagaggacgtggaagcaacgaagatggccgttgaaaacatgtcgcctgggaatatggatatcaaacgtctggtcttccacaactggtgcaaggatgaatttgccaaaggcgcgtggttcttcgcccctccacagctgctgtcaaagagcctggatgaactgcgctgccgtagtggtaatgtcctgtttgcaaactccgattgggccttaggttggcgtggttttatcgatggtgctatcgaggagggcacccgcgcagcggttactgtaattgaggaactgcgtcctgcgcctgcggtgcgttcccacctg

SEQ ID NO: 386 - protein, 495 aa, synthetic construct
  REGION 1..495: note = Variant of monoamine oxidase
MTSRDGYQWTPETGLTQGVPSLGVISPPTNIEDTDKDGPWDVIVIGGGYCGLTATRDLTVAGFKTLLLEARDRIGGRSWSSNIDGYPYEMGGTWVHWHQSHVWREITRYKMHNALSPSFNFSRGVNHFQLRTNPTTSTYMTHEAEDELLRSALHKFTNVDGTNGRTVLPFPHDMFYVPEFRKYDEMSYSERIDQIRDELSLNERSSLEAFILLCSGGTLENSSFGEFLHWWAMSGYTYQGCMDCLISYKFKDGQSAFARRFWEEAAGTGRLGYVFGCPVRSVVNERDAVRVTARDGREFAAKRLVCTIPLNVLSSVHFSPPLSPQRMAAANIGHVNQCVKVHAEVSCPDMRSWSGISYPFNKLAYAIGDGTTPAGNTHIVCLGGAHNHIQPEEDVEATKMAVENMSPGNMDIKRLVFHNWCKDEFAKGAWFFAPPQLLSKSLDELRCRSGNVLFANSDWALGWRGFIDGAIEEGTRAAVTVIEELRPAPAVRSHL

SEQ ID NO: 387 - DNA, 1485 bp, synthetic construct
  misc_feature 1..1485: note = Variant of monoamine oxidase
  source 1..1485: mol_type = other DNA
atgaccagccgcgacggctatcagtggaccccggaaacgggtctgacccagggcgtaccgtccctgggtgtcatttcgccgccgactaacatcgaagataccgataaggacgggccttgggatgtcattgtcattgggggcgggtattgtgggctgaccgcaacccgtgatttaaccgtcgcagggttcaagacgctgctgctggaggcccgtgatcgtattggtggccgctcctggagcagtaatattgacggttacccgtatgagatgggtggcacttgggttcattggcatcaatctcacgtgtggaaggaaatcacgcgttataaaatgcacaacgcgctgtctccatcatttaacttttcacgtggcgtgaatcacttccaactgcgtaccaatccgaccaccagtacgtacatgacgcacgaagcggaggatgaactgctgcgtagcgcattgcataaattcaccaatgtcgacggcactaatggccgtacagtgttgccgttcccacatgatatgttttatgtgccggaatttcgcaagtatgacgaaatgtcatattccgaacgcattgaccagatccgcgacgaactgtctttgaacgaacgctctagtttagaggctttcattttattatgtagcggtggcaccctggaaaactccagctttggtgaatttctgcattggtgggcaatgtcgggttacacgtatcagggctgtatggattgtttaatctcctataaatttaaggatggccagagtgcgttcgcgcgtcgcttctgggaagaagccgctggcactggccgtctgggctatgtctttggttgtccggtgcgttctgtggtgaacgaacgcgacgcagtacgtgttaccgcacgtgacggtcgcgaattcgcagcgaaacgtttggtttgcacgattccgctgaacgtattgagttctgttcattttagcccaccactgtccccgcaacgcatggccgctgcgaacattggccatgttaaccagtgcgtcaaagtgcatgcggaagtcagttgtccggatatgcgttcatggtcgggtatctcctatccgttcaacaaattagcctacgctatcggcgatggcacgaccccagcgggtaatacgcatattgtgtgccttgggggggcccataatcatatccagccggaagaggacgtggaagcaacgaagatggccgttgaaaacatgtcgcctgggaatatggatatcaaacgtctggtcttccacaactggtgcaaggatgaatttgccaaaggcgcgtggttcttcgcccctccacagctgctgtcaaagagcctggatgaactgcgctgccgtcacggtaatgtcctgtttgcaaactccgattgggccttaggttggcgtggttttatcgatggtgctatcgaggagggcacccgcgcagcggttactgtaattgaggaactgcgtcctgcgcctgcggtgcgttcccacctg

SEQ ID NO: 388 - protein, 495 aa, synthetic construct
  REGION 1..495: note = Variant of monoamine oxidase
MTSRDGYQWTPETGLTQGVPSLGVISPPTNIEDTDKDGPWDVIVIGGGYCGLTATRDLTVAGFKTLLLEARDRIGGRSWSSNIDGYPYEMGGTWVHWHQSHVWKEITRYKMHNALSPSFNFSRGVNHFQLRTNPTTSTYMTHEAEDELLRSALHKFTNVDGTNGRTVLPFPHDMFYVPEFRKYDEMSYSERIDQIRDELSLNERSSLEAFILLCSGGTLENSSFGEFLHWWAMSGYTYQGCMDCLISYKFKDGQSAFARRFWEEAAGTGRLGYVFGCPVRSVVNERDAVRVTARDGREFAAKRLVCTIPLNVLSSVHFSPPLSPQRMAAANIGHVNQCVKVHAEVSCPDMRSWSGISYPFNKLAYAIGDGTTPAGNTHIVCLGGAHNHIQPEEDVEATKMAVENMSPGNMDIKRLVFHNWCKDEFAKGAWFFAPPQLLSKSLDELRCRHGNVLFANSDWALGWRGFIDGAIEEGTRAAVTVIEELRPAPAVRSHL

SEQ ID NO: 389 - DNA, 1485 bp, synthetic construct
  misc_feature 1..1485: note = Variant of monoamine oxidase
  source 1..1485: mol_type = other DNA
atgaccagccgcgacggctatcagtggaccccggaaacgggtctgacccagggcgtaccgtccctgggtgtcatttcgccgccgactaacatcgaagataccgataaggacgggccttgggatgtcattgtcattgggggcgggtattgtgggctgaccgcaacccgtgatttaaccgtcgcagggttcaagacgctgctgctggaggcccgtgatcgtattggtggccgctcctggagcagtaatattgacggttacccgtatgagatgggtggcacttgggttcattggcatcaatctcacgtgtggcgtgaaatcacgcgttataaaatgcacaacgcgctgtctccatcatttaacttttcacgtggcgtgaatcacttccaactgcgtaccaatccgaccaccagtacgtacatgacgcacgaagcggaggatgaactgctgcgtagcgcattgcataaattcaccaatgtcgacggcactaatggccgtacagtgttgccgttcccacatgatatgttttatgtgccggaatttcgcaagtatgacgaaatgtcatattccgaacgcattgaccagatccgcgacgaactgtctttgaacgaacgctctagtttagaggctttcattttattatgtagcggtggcaccctggaaaactccagctttggtgaatttctgcattggtgggcaatgtcgggttacacgtatcagggctgtatggattgtttaatctcctataaatttaaggatggccagagtgcgttcgcgcgtcgcttctgggaagaagccgctggcactggccgtctgggctatgtctttggttgtccggtgcgttctgtggtgaacgaacgcgacgcagtacgtgttaccgcacgtgacggtcgcgaattcgcagcgaaacgtttggtttgcacgattccgctgaacgtattgagttctgttcattttagcccaccactgtccccgcaacgcatggccgctgcgaacattggccatgttaaccagtgcgtcaaagtgcatgcggaagtcagttgtccggatatgcgttcatggtcgggtatctcctatccgttcaacaaattagcctacgctatcggcgatggcacgaccccagcgggtaatacgcatattgtgtgccttgggggggcccataatcatatccagccggaagaggacgtggaagcaacgaagatggccgttgaaaacatgtcgcctgggaatatggatatcaaacgtctggtcttccacaactggtgcaaggatgaatttgccaaaggcgcgtggttcttcgccgagccacagctgctgtcaaagagcctggatgaactgcgctgccgtcacggtaatgtcctgtttgcaaactccgattgggccttaggttggcgtggttttatcgatggtgctatcgaggagggcacccgcgcagcggttactgtaattgaggaactgcgtcctgcgcctgcggtgcgttcccacctg

SEQ ID NO: 390 - protein, 495 aa, synthetic construct
  REGION 1..495: note = Variant of monoamine oxidase
MTSRDGYQWTPETGLTQGVPSLGVISPPTNIEDTDKDGPWDVIVIGGGYCGLTATRDLTVAGFKTLLLEARDRIGGRSWSSNIDGYPYEMGGTWVHWHQSHVWREITRYKMHNALSPSFNFSRGVNHFQLRTNPTTSTYMTHEAEDELLRSALHKFTNVDGTNGRTVLPFPHDMFYVPEFRKYDEMSYSERIDQIRDELSLNERSSLEAFILLCSGGTLENSSFGEFLHWWAMSGYTYQGCMDCLISYKFKDGQSAFARRFWEEAAGTGRLGYVFGCPVRSVVNERDAVRVTARDGREFAAKRLVCTIPLNVLSSVHFSPPLSPQRMAAANIGHVNQCVKVHAEVSCPDMRSWSGISYPFNKLAYAIGDGTTPAGNTHIVCLGGAHNHIQPEEDVEATKMAVENMSPGNMDIKRLVFHNWCKDEFAKGAWFFAEPQLLSKSLDELRCRHGNVLFANSDWALGWRGFIDGAIEEGTRAAVTVIEELRPAPAVRSHL

SEQ ID NO: 391 - DNA, 1485 bp, synthetic construct
  misc_feature 1..1485: note = Variant of monoamine oxidase
  source 1..1485: mol_type = other DNA
atgaccagccgcgacggctatcagtggaccccggaaacgggtctgacccagggcgtaccgtccctgggtgtcatttcgccgccgactaacatcgaagataccgataaggacgggccttgggatgtcattgtcattgggggcgggtattgtgggctgaccgcaacccgtgatttaaccgtcgcagggttcaagacgctgctgctggaggcccgtgatcgtattggtggccgctcctggagcagtaatattgacggttacccgtatgagatgggtggcacttgggttcattggcatcaatctcacgtgtggcgtgaaatcacgcgttataaaatgcacaacgcgctgtctccatcatttaacttttcacgtggcgtgaatcacttccaactgcgtaccaatccgaccaccagtacgtacatgacgcacgaagcggaggatgaactgctgcgtagcgcattgcataaattcaccaatgtcgacggcactaatggccgtacagtgttgccgttcccacatgatatgttttatgtgccggaatttcgcaagtatgacgaaatgtcatattccgaacgcattgaccagatccgcgacgaactgtctttgaacgaacgctctagtttagaggctttcgggttattatgtagcggtggcaccctggaaaactccagctttggtgaatttctgcattggtgggcaatgtcgggttacacgtatcagggctgtatggattgtttaatctcctataaatttaaggatggccagagtgcgttcgcgcgtcgcttctgggaagaagccgctggcactggccgtctgggctatgtctttggttgtccggtgcgttctgtggtgaacgaacgcgacgcagtacgtgttaccgcacgtgacggtcgcgaattcgcagcgaaacgtttggtttgcacgattccgctgaacgtattgagttctgttcattttagcccaccactgtccccgcaacgcatggccgctgcgaacattggccatgttaaccagtgcgtcaaagtgcatgcggaagtcagttgtccggatatgcgttcatggtcgggtatctcctatccgttcaacaaattagcctacgctatcggcgatggcacgaccccagcgggtaatacgcatattgtgtgccttgggggggcccataatcatatccagccggaagaggacgtggaagcaacgaagatggccgttgaaaacatgtcgcctgggaatatggatatcaaacgtctggtcttccacaactggtgcaaggatgaatttgccaaaggcgcgtggttcttcgcccctccacagctgctgtcaaagagcctggatgaactgcgctgccgtcacggtaatgtcctgtttgcaaactccgattgggccttaggttggcgtggttttatcgatggtgctatcgaggagggcacccgcgcagcggttactgtaattgaggaactgcgtcctgcgcctgcggtgcgttcccacctg

SEQ ID NO: 392 - protein, 495 aa, synthetic construct
  REGION 1..495: note = Variant of monoamine oxidase
MTSRDGYQWTPETGLTQGVPSLGVISPPTNIEDTDKDGPWDVIVIGGGYCGLTATRDLTVAGFKTLLLEARDRIGGRSWSSNIDGYPYEMGGTWVHWHQSHVWREITRYKMHNALSPSFNFSRGVNHFQLRTNPTTSTYMTHEAEDELLRSALHKFTNVDGTNGRTVLPFPHDMFYVPEFRKYDEMSYSERIDQIRDELSLNERSSLEAFGLLCSGGTLENSSFGEFLHWWAMSGYTYQGCMDCLISYKFKDGQSAFARRFWEEAAGTGRLGYVFGCPVRSVVNERDAVRVTARDGREFAAKRLVCTIPLNVLSSVHFSPPLSPQRMAAANIGHVNQCVKVHAEVSCPDMRSWSGISYPFNKLAYAIGDGTTPAGNTHIVCLGGAHNHIQPEEDVEATKMAVENMSPGNMDIKRLVFHNWCKDEFAKGAWFFAPPQLLSKSLDELRCRHGNVLFANSDWALGWRGFIDGAIEEGTRAAVTVIEELRPAPAVRSHL

SEQ ID NO: 393 - DNA, 1485 bp, synthetic construct
  misc_feature 1..1485: note = Variant of monoamine oxidase
  source 1..1485: mol_type = other DNA
atgaccagccgcgacggctatcagtggaccccggaaacgggtctgacccagggcgtaccgtccctgggtgtcatttcgccgccgactaacatcgaggataccgataaggacgggccttgggatgtcattgtcattgggggcgggtattgtgggctgaccgcaacccgtgatttaaccgtcgcagggttcaaggtactgctgctggaggcccgtgatcgtattggtggccgctcctggagcagtaatattgacggttacccgtatgagatgggtggcacttgggttcattggcatcaatctcacgtgtggcgtgaaatcacgcgttataaaatgcacaacgcgctgtctccatcatttaacttttcacgtggcgtgaatcacttccaactgcgtaccaatccgaccaccagtacgtacatgacgcacgaagcggaggatgaactgctgcgtagcgcattgcataaattcaccaatgtcgacggcactaatggccgtacagtgttgccgttcccacatgatatgttttatgtgccggaatttcgcaagtatgacgaaatgtcatattcggatcgcattgaccagatccgcgacgaactgtctttgaacgaacgctctagtttagaggctttcattttattatgtagcggtggcaccctggaaaactccagctttggtgaatttctgcattggtgggcaatgtcgggttacacgtatcagggctgtatggattgtttaatctcctataaatttaaggatggccagagtgcgttcgcgcgtcgcttctgggaagaagccgctggcactggccgtctgggctatgtctttggttgtccggtgcgttctgtggtgaacgaacgcgacgcagtacgtgttaccgcacgtgacggtcgcgaattcgcagcgaaacgtttggtttgcacgattccgctgaacgtattgagttctgttcattttagcccaccactgtccccgcaacgcatggccgctgcgaacattggccatgttaaccagtgcgtcaaagtgcatgcggaagtcagttgtccggatatgcgttcatggtcgggtatctcctatccgttcaacaaattagcctacgctatcggcgatggcacgaccccagcgggtaatacgcatattgtgtgccttgggggggcgcataatcatatccagccggaagaggacgtggaagcaacgaagatggccgttgaaaacatgtcgcctgggaatatggatatcaaacgtctggtcttccacaactggtgcaaggatgaatttgccaaaggcgcgtggttcttcgcccctccacagctgctgtcaaagagcctggatgaactgcgctgccgtcacggtaatgtcctgtttgcaaactccgattgggccttaggttggcgtggttttatcgatggtgctatcgaggagggcacccgcgcagcggttactgtaattgaggaactgcgtcctgcgcctgcggtgcgttcccacctg

SEQ ID NO: 394 - protein, 495 aa, synthetic construct
  REGION 1..495: note = Variant of monoamine oxidase
MTSRDGYQWTPETGLTQGVPSLGVISPPTNIEDTDKDGPWDVIVIGGGYCGLTATRDLTVAGFKVLLLEARDRIGGRSWSSNIDGYPYEMGGTWVHWHQSHVWREITRYKMHNALSPSFNFSRGVNHFQLRTNPTTSTYMTHEAEDELLRSALHKFTNVDGTNGRTVLPFPHDMFYVPEFRKYDEMSYSDRIDQIRDELSLNERSSLEAFILLCSGGTLENSSFGEFLHWWAMSGYTYQGCMDCLISYKFKDGQSAFARRFWEEAAGTGRLGYVFGCPVRSVVNERDAVRVTARDGREFAAKRLVCTIPLNVLSSVHFSPPLSPQRMAAANIGHVNQCVKVHAEVSCPDMRSWSGISYPFNKLAYAIGDGTTPAGNTHIVCLGGAHNHIQPEEDVEATKMAVENMSPGNMDIKRLVFHNWCKDEFAKGAWFFAPPQLLSKSLDELRCRHGNVLFANSDWALGWRGFIDGAIEEGTRAAVTVIEELRPAPAVRSHL

SEQ ID NO: 395 - DNA, 1485 bp, synthetic construct
  misc_feature 1..1485: note = Variant of monoamine oxidase
  source 1..1485: mol_type = other DNA
atgaccagccgcgacggctatcagtggaccccggaaacgggtctgacccagggcgtaccgtccctgggtgtcatttcgccgccgactaacatcgaagataccgataaggacgggccttgggatgtcattgtcattgggggcgggtattgtgggctgaccgcaacccgtgatttaaccgtcgcagggttcaagacgctgctgctggaggcccgtgatcgtattggtggccgctcctggagcagtaatattgacggttacccgtatgagatgggtggcacttgggttcattggcatcaatctcacgtgtggcgtgaaatcacgcgttataaaatgcacaacgcgctgtctccatcatttaacttttcacgtggcgtgaatcacttccaactgcgtaccaatccgaccaccagtacgtacatgacgcacgaagcggaggatgaactgctgcgtagcgcattgcataaattcaccaatgtcgacggcactaatggccgtacagtgttgccgttcccacatgatatgttttatgtgccggaatttcgcaagtatgacgaaatgtcatattccgaacgcattgaccagatccgcgacgaactgtctttgaacgaacgctctagtttagaggctttcattttattatgtagcggtggcaccctggaaaactccagctttggtgaatttctgcattggtgggcaatgtcgggttacacgtatcagggctgtatggattgtttaatctcctataaatttaaggatggccagagtgcgttcgcgcgtcgcttctgggaagaagccgctggcactggccgtctgggctatgtctttggttgtccggtgcgttctgtggtgaacgaacgcgacgcagtacgtgttaatgcacgtgacggtcgcgaattcgcagcgaaacgtttggtttgcacgattccgctgaacgtattgagttctgttcattttagcccaccactgtccccgcaacgcatggccgctgcgaacattggccatgttaaccagtgcgtcaaagtgcatgcggaagtcagttgtccggatatgcgttcatggtcgggtatctcctatccgttcaacaaattagcctacgctatcggcgatggcacgaccccagcgggtaatacgcatattgtgtgccttgggggggcccataatcatatccagccggaagaggacgtggaagcaacgaagatggccgttgaaaacatgtcgcctgggaatatggatatcaaacgtctggtcttccacaactggtgcaaggatgaatttgccaaaggcgcgtggttcttcgcccctccacagctgctgtcaaagagcctggatgaactgcgctgccgtcacggtaatgtcctgtttgcaaactccgattgggccttaggttggcgtggttttatcgatggtgctatcgaggagggcacccgcgcagcggttactgtaattgaggaactgcgtcctgcgcctgcggtgcgttcccacctg

SEQ ID NO: 396 - protein, 495 aa, synthetic construct
  REGION 1..495: note = Variant of monoamine oxidase
MTSRDGYQWTPETGLTQGVPSLGVISPPTNIEDTDKDGPWDVIVIGGGYCGLTATRDLTVAGFKTLLLEARDRIGGRSWSSNIDGYPYEMGGTWVHWHQSHVWREITRYKMHNALSPSFNFSRGVNHFQLRTNPTTSTYMTHEAEDELLRSALHKFTNVDGTNGRTVLPFPHDMFYVPEFRKYDEMSYSERIDQIRDELSLNERSSLEAFILLCSGGTLENSSFGEFLHWWAMSGYTYQGCMDCLISYKFKDGQSAFARRFWEEAAGTGRLGYVFGCPVRSVVNERDAVRVNARDGREFAAKRLVCTIPLNVLSSVHFSPPLSPQRMAAANIGHVNQCVKVHAEVSCPDMRSWSGISYPFNKLAYAIGDGTTPAGNTHIVCLGGAHNHIQPEEDVEATKMAVENMSPGNMDIKRLVFHNWCKDEFAKGAWFFAPPQLLSKSLDELRCRHGNVLFANSDWALGWRGFIDGAIEEGTRAAVTVIEELRPAPAVRSHL

SEQ ID NO: 397 - DNA, 1485 bp, synthetic construct
  misc_feature 1..1485: note = Variant of monoamine oxidase
  source 1..1485: mol_type = other DNA
atgaccagccgcgacggctatcagtggaccccggaaacgggtctgacccagggcgtaccgtccctgggtgtcatttcgccgccgactaacatcgaagataccgataaggacgggccttgggatgtcattgtcattgggggcgggtattgtgggctgaccgcaacccgtgatttaaccgtcgcagggttcaagacgctgctgctggaggcccgtgatcgtattggtggccgctcctggagcagtaatattgacggttacccgtatgagatgggtggcacttgggttcattggcatcaatctcacgtgtggcgtgaaatcacgcgttataaaatgcacaacgcgctgtctccatcatttaacttttcacgtggcgtgaatggtttccaactgcgtaccaatccgaccaccagtacgtacatgacgcacgaagcggaggatgaactgctgcgtagcgcattgcataaattcaccaatgtcgacggcactaatggccgtacagtgttgccgttcccacatgatatgttttatgtgccggaatttcgcaagtatgacgaaatgtcatattccgaacgcattgaccagatccgcgacgaactgtctttgaacgaacgctctagtttagaggctttcattttattatgtagcggtggcaccctggaaaactccagctttggtgaatttctgcattggtgggcaatgtcgggttacacgtatcagggctgtatggattgtttaatctcctataaatttaaggatggccagagtgcgttcgcgcgtcgcttctgggaagaagccgctggcactggccgtctgggctatgtctttggttgtccggtgcgttctgtggtgaacgaacgcgacgcagtacgtgttaccgcacgtgacggtcgcgaattcgcagcgaaacgtttggtttgcacgattccgctgaacgtattgagttctgttcattttagcccaccactgtccccgcaacgcatggccgctgcgaacattggccatgttaaccagtgcgtcaaagtgcatgcggaagtcagttgtccggatatgcgttcatggtcgggtatctcctatccgttcaacaaattagcctacgctatcggcgatggcacgaccccagcgggtaatacgcatattgtgtgccttgggggggcccataatcatatccagccggaagaggacgtggaagcaacgaagatggccgttgaaaacatgtcgcctgggaatatggatatcaaacgtctggtcttccacaactggtgcaaggatgaatttgccaaaggcgcgtggttcttcgcccctccacagctgctgtcaaagagcctggatgaactgcgctgccgtcacggtaatgtcctgtttgcaaactccgattgggccttaggttggcgtggttttatcgatggtgctatcgaggagggcacccgcgcagcggttactgtaattgaggaactgcgtcctgcgcctgcggtgcgttcccacctg

SEQ ID NO: 398 - protein, 495 aa, synthetic construct
  REGION 1..495: note = Variant of monoamine oxidase
MTSRDGYQWTPETGLTQGVPSLGVISPPTNIEDTDKDGPWDVIVIGGGYCGLTATRDLTVAGFKTLLLEARDRIGGRSWSSNIDGYPYEMGGTWVHWHQSHVWREITRYKMHNALSPSFNFSRGVNGFQLRTNPTTSTYMTHEAEDELLRSALHKFTNVDGTNGRTVLPFPHDMFYVPEFRKYDEMSYSERIDQIRDELSLNERSSLEAFILLCSGGTLENSSFGEFLHWWAMSGYTYQGCMDCLISYKFKDGQSAFARRFWEEAAGTGRLGYVFGCPVRSVVNERDAVRVTARDGREFAAKRLVCTIPLNVLSSVHFSPPLSPQRMAAANIGHVNQCVKVHAEVSCPDMRSWSGISYPFNKLAYAIGDGTTPAGNTHIVCLGGAHNHIQPEEDVEATKMAVENMSPGNMDIKRLVFHNWCKDEFAKGAWFFAPPQLLSKSLDELRCRHGNVLFANSDWALGWRGFIDGAIEEGTRAAVTVIEELRPAPAVRSHL

SEQ ID NO: 399 - DNA, 1485 bp, synthetic construct
  misc_feature 1..1485: note = Variant of monoamine oxidase
  source 1..1485: mol_type = other DNA
atgaccagccgcgacggctatcagtggaccccggaaacgggtctgacccagggcgtaccgtccctgggtgtcatttcgccgccgactaacatcgaagataccgataaggacgggccttgggatgtcattgtcattgggggcgggtattgtgggctgaccgcaacccgtgatttaaccgtcgcagggttcaagacgctgctgctggaggcccgtgatcgtattggtggccgctcctggagcagtaatattgacggttacccgtatgagatgggtggcacttgggttcattggcatcaatctcacgtgtggcgtgaaatcacgcgttataaaatgcacaacgcgctgtctccatcatttaacttttcacgtggcgtgaatcacttccaactgcgtaccaatccgaccaccagtacgtacatgacgcacgaagcggaggatgaactgctgcgtagcgcattgcataaattcaccaatgtcgacggcactaatggccgtacagtgttgccgttcccacatgatatgttttatgtgccggaatttcgcaagtatgacgaaatgtcatattccgaacgcattgaccagatccgcgacgaactgtctttgaacgaacgctctagtttagaggctttcattttattatgtagcggtggcaccctggaaaactccagctttggtgaatttctgcattggtgggcaatgtcgggttacacgtatcagggctgtatggattgtttaatctcctataaatttaaggatggccagagtgcgttcgcgcgtcgcttctgggaagaagccgctggcactggccgtctgggctatgtctttggttgtccggtgcgttctgtggtgaacgaacgcgacgcagtacgtgttaccgcacgtgacggtcgcgaattcgcagcgaaacgtttggtttgcacgattccgctgaacgtattgagttctgttcattttagcccaccactgtccccgcaacgcatggccgctgcgaacattggccatgttaaccagtgcgtcaaagtgcatgcggaagtcagttgtccggatatgcgttcatggtcgggtatctcctatccgttcaacaaattagcctacgctatcggcgatggcacgaccccagcgggtaatacgcatattgtgtgccttgggggggcccataatcatatccagccggaagaggacgtggaagcaacgaagatggccgttgaaaacatgtcgcctgggaatatggatatcaaacgtctggtcttcgctaactggtgcaaggatgaatttgccaaaggcgcgtggttcttcgcccctccacagctgctgtcaaagagcctggatgaactgcgctgccgtcacggtaatgtcctgtttgcaaactccgattgggccttaggttggcgtggttttatcgatggtgctatcgaggagggcacccgcgcagcggttactgtaattgaggaactgcgtcctgcgcctgcggtgcgttcccacctg

SEQ ID NO: 400 - protein, 495 aa, synthetic construct
  REGION 1..495: note = Variant of monoamine oxidase
MTSRDGYQWTPETGLTQGVPSLGVISPPTNIEDTDKDGPWDVIVIGGGYCGLTATRDLTVAGFKTLLLEARDRIGGRSWSSNIDGYPYEMGGTWVHWHQSHVWREITRYKMHNALSPSFNFSRGVNHFQLRTNPTTSTYMTHEAEDELLRSALHKFTNVDGTNGRTVLPFPHDMFYVPEFRKYDEMSYSERIDQIRDELSLNERSSLEAFILLCSGGTLENSSFGEFLHWWAMSGYTYQGCMDCLISYKFKDGQSAFARRFWEEAAGTGRLGYVFGCPVRSVVNERDAVRVTARDGREFAAKRLVCTIPLNVLSSVHFSPPLSPQRMAAANIGHVNQCVKVHAEVSCPDMRSWSGISYPFNKLAYAIGDGTTPAGNTHIVCLGGAHNHIQPEEDVEATKMAVENMSPGNMDIKRLVFANWCKDEFAKGAWFFAPPQLLSKSLDELRCRHGNVLFANSDWALGWRGFIDGAIEEGTRAAVTVIEELRPAPAVRSHL

SEQ ID NO: 401 - DNA, 1485 bp, synthetic construct
  misc_feature 1..1485: note = Variant of monoamine oxidase
  source 1..1485: mol_type = other DNA
atgaccagccgcgacggctatcagtggaccccggaaacgggtctgacccagggcgtaccgtccctgggtgtcatttcgccgccgactaacatcgaagataccgataaggacgggccttgggatgtcattgtcattgggggcgggtattgtgggctgaccgcaacccgtgatttaaccgtcgcagggttcaagacgctgctgctggaggcccgtgatcgtattggtggccgctcctggagcagtaatattgacggttacccgtatgagatgggtggcacttgggttcattggcatcaatctcacgtgtggcgtgaaatcacgcgttataaaatgcacaacgcgctgtctccatcatttaacttttcacgtggcgtgaatcacttccaactgcgtaccaatccgaccaccagtacgtacatgacgcacgaagcggaggatgaactgctgcgtagcgcattgcataaattcaccaatgtcgacggcactaatggccgtacagtgttgccgttcccacatgatatgttttatgtgccggaatttcgcaagtatgacgaaatgtcatattccgaacgcattgaccagatccgcgacgaactgtctttgaacgaacgctctagtttagaggctttcattttattatgtagcggtggcaccctggaaaactccagctttggtgaatttctgcattggtgggcaatgtcgggttacacgtatcagggctgtatggattgtttaatctcctataaatttaaggatggccagagtgcgttcgcgcgtcgcttctgggaagaagccgctggcactggccgtctgggctatgtctttggttgtccggtgcgttctgtggtgaacgaacgcgacgcagtacgtgttaccgcacgtgacggtcgcgaattcgcagcgaaacgtttggtttgcacgattccgctgaacgtattgagttctgttcattttagcccaccactgtccccgcaacgcatggccgctgcgaacattggccatgttaaccagtgcgtcaaagtgcatgcggaagtcagttgtccggatatgcgttcatggtcgggtatctcctatccgttcaacaaattagcctacgctatcggcgatggcacgaccccagcgggtaatacgcatattgtgtgccttgggggggcccataatcatatccagccggaagaggacgtggaagcaacaaagatggccgttgaaaacatgtcgcctgggaatatggatatcaaacgtctggtcttccacaactggtgcaaggatgaatttgccaaaggcgcgtggttcttcgcccctccacagctgctgtcaaagagcctggataggctgcgctgccgtcacggtaatgtcctgtttgcaaactccgattgggccttaggttggcgtggttttatcgatggtgctatcgaggagggcacccgcgcagcggttactgtaattgaggaactgcgtcctgcgcctgcggtgcgttcccacctg

SEQ ID NO: 402 - protein, 495 aa, synthetic construct
  REGION 1..495: note = Variant of monoamine oxidase
MTSRDGYQWTPETGLTQGVPSLGVISPPTNIEDTDKDGPWDVIVIGGGYCGLTATRDLTVAGFKTLLLEARDRIGGRSWSSNIDGYPYEMGGTWVHWHQSHVWREITRYKMHNALSPSFNFSRGVNHFQLRTNPTTSTYMTHEAEDELLRSALHKFTNVDGTNGRTVLPFPHDMFYVPEFRKYDEMSYSERIDQIRDELSLNERSSLEAFILLCSGGTLENSSFGEFLHWWAMSGYTYQGCMDCLISYKFKDGQSAFARRFWEEAAGTGRLGYVFGCPVRSVVNERDAVRVTARDGREFAAKRLVCTIPLNVLSSVHFSPPLSPQRMAAANIGHVNQCVKVHAEVSCPDMRSWSGISYPFNKLAYAIGDGTTPAGNTHIVCLGGAHNHIQPEEDVEATKMAVENMSPGNMDIKRLVFHNWCKDEFAKGAWFFAPPQLLSKSLDRLRCRHGNVLFANSDWALGWRGFIDGAIEEGTRAAVTVIEELRPAPAVRSHL

SEQ ID NO: 403 - DNA, 1485 bp, synthetic construct
  misc_feature 1..1485: note = Variant of monoamine oxidase
  source 1..1485: mol_type = other DNA
atgaccagccgcgacggctatcagtggaccccggaaacgggtctgacccagggcgtaccgtccctgggtgtcatttcgccgccgactaacatcgaagataccgataaggacgggccttgggatgtcattgtcattgggggcgggtattgtgggctgaccgcaacccgtgatttaaccgtcgcagggttcaagacgctgctgctggaggcccgtgatcgtattggtggccgctcctggagcagtaatattgacggttacccgtatgagatgggtggcacttgggttcattggcatcaatctcacgtgtggcgtgaaatcacgcgttataaaatgcacaacgcgctgtctccatcatttaacttttcacgtggcgtgaatcacttccaactgcgtaccaatccgaccaccagtacgtacatgacgcacgaagcggaggatgaactgctgcgtagcgcattgcataaattcaccaatgtcgacggcactaatggccgtacagtgttgccgttcccacatgatatgttttatgtgccggaatttcgcaagtatgacgaaatgtcatattccgaacgcattgaccagatccgcgacgaactgtctttgaacgaacgctctagtttagaggctttcattttattatgtagcggtggcaccctggaaaactccagctttggtgaatttctgcattggtgggcaatgtcgggttacacgtatcagggctgtatggattgtttaatctcctataaatttaaggatggccagagtgcgttcgcgcgtcgcttctgggaagaagccgctggcactggccgtctgggctatgtctttggttgtccggtgcgttctgtggtgaacgaacgcgacgcagtacaggttaccgcacgtgacggtcgcgaattcgcagcgaaacgtttggtttgcacgattccgctgaacgtattgagttctgttcattttagcccaccactgtccccgcaacgcatggccgctgcgaacattggccatgttaaccagtgcgtcaaagtgcatgcggaagtcagttgtccggatatgcgttcatggtcgggtatctcctatccgttcaacaaattagcctacgctatcggcgatggcacgaccccagcgggtaatacgcatattgtgtgccttgggggggcccataatcatatccagccggaagaggacgtggaagcaacgaagatggccgttgaaaacatgtcgcctgggaatatggatatcaaacgtctggtcttccacaactggtgcaaggatgaatttgccaaaggcgcgtggttcttcgcccctccacagctgctgtcaaagagcctggatgaactgcgctgccgtcacggtaatgtcctgtttgcaaactccgattgggccttaggttggcgtggttttatcgatggtgctatcgaggagggcacccgcgcagcggttactgtaattgaggaactgcgtcctgcgcctgcggtgcgttcccacctg

SEQ ID NO: 404 - protein, 495 aa, synthetic construct
  REGION 1..495: note = Variant of monoamine oxidase
MTSRDGYQWTPETGLTQGVPSLGVISPPTNIEDTDKDGPWDVIVIGGGYCGLTATRDLTVAGFKTLLLEARDRIGGRSWSSNIDGYPYEMGGTWVHWHQSHVWREITRYKMHNALSPSFNFSRGVNHFQLRTNPTTSTYMTHEAEDELLRSALHKFTNVDGTNGRTVLPFPHDMFYVPEFRKYDEMSYSERIDQIRDELSLNERSSLEAFILLCSGGTLENSSFGEFLHWWAMSGYTYQGCMDCLISYKFKDGQSAFARRFWEEAAGTGRLGYVFGCPVRSVVNERDAVQVTARDGREFAAKRLVCTIPLNVLSSVHFSPPLSPQRMAAANIGHVNQCVKVHAEVSCPDMRSWSGISYPFNKLAYAIGDGTTPAGNTHIVCLGGAHNHIQPEEDVEATKMAVENMSPGNMDIKRLVFHNWCKDEFAKGAWFFAPPQLLSKSLDELRCRHGNVLFANSDWALGWRGFIDGAIEEGTRAAVTVIEELRPAPAVRSHL

SEQ ID NO: 405 - DNA, 1485 bp, synthetic construct
  misc_feature 1..1485: note = Variant of monoamine oxidase
  source 1..1485: mol_type = other DNA
atgaccagccgcgacggctatcagtggaccccggaaacgggtctgacccagggcgtaccgtccctgggtgtcatttcgccgccgactaacatcgaagataccgataaggacgggccttgggatgtcattgtcattgggggcgggtattgtgggctgaccgcaacccgtgatttaaccgtcgcagggttcaagacgctgctgctggaggcccgtgatcgtattggtggccgctcctggagcagtaatattgacggttacccgtatgagatgggtggcacttgggttcattggcatcaatctcacgtgtggcgtgaaatcacgcgttataaaatgcacaacgcgctgtctccatcatttaacttttcacgtggcgtgaatcacttccaactgcgtaccaatccgggcaccagtacgtacatgacgcacgaagcggaggatgaactgctgcgtagcgcattgcataaattcaccaatgtcgacggcactaatggccgtacagtgttgccgttcccacatgatatgttttatgtgccggaatttcgcaagtatgacgaaatgtcatattccgaacgcattgaccagatccgcgacgaactgtctttgaacgaacgctctagtttagaggctttcattttattatgtagcggtggcaccctggaaaactccagctttggtgaatttctgcattggtgggcaatgtcgggttacacgtatcagggctgtatggattgtttaatctcctataaatttaaggatggccagagtgcgttcgcgcgtcgcttctgggaagaagccgctggcactggccgtctgggctatgtctttggttgtccggtgcgttctgtggtgaacgaacgcgacgcagtacgtgttaccgcacgtgacggtcgcgaattcgcagcgaaacgtttggtttgcacgattccgctgaacgtattgagttctgttcattttagcccaccactgtccccgcaacgcatggccgctgcgaacattggccatgttaaccagtgcgtcaaagtgcatgcggaagtcagttgtccggatatgcgttcatggtcgggtatctcctatccgttcaacaaattagcctacgctatcggcgatggcacgaccccagcgggtaatacgcatattgtgtgccttgggggggcccataatcatatccagccggaagaggacgtggaagcaacgaagatggccgttgaaaacatgtcgcctgggaatatggatatcaaacgtctggtcttccacaactggtgcaaggatgaatttgccaaaggcgcgtggttcttcgcccctccacagctgctgtcaaagagcctggatgaactgcgctgccgtcacggtaatgtcctgtttgcaaactccgattgggccttaggttggcgtggttttatcgatggtgctatcgaggagggcacccgcgcagcggttactgtaattgaggaactgcgtcctgcgcctgcggtgcgttcccacctg

SEQ ID NO: 406 - protein, 495 aa, synthetic construct
  REGION 1..495: note = Variant of monoamine oxidase
MTSRDGYQWTPETGLTQGVPSLGVISPPTNIEDTDKDGPWDVIVIGGGYCGLTATRDLTVAGFKTLLLEARDRIGGRSWSSNIDGYPYEMGGTWVHWHQSHVWREITRYKMHNALSPSFNFSRGVNHFQLRTNPGTSTYMTHEAEDELLRSALHKFTNVDGTNGRTVLPFPHDMFYVPEFRKYDEMSYSERIDQIRDELSLNERSSLEAFILLCSGGTLENSSFGEFLHWWAMSGYTYQGCMDCLISYKFKDGQSAFARRFWEEAAGTGRLGYVFGCPVRSVVNERDAVRVTARDGREFAAKRLVCTIPLNVLSSVHFSPPLSPQRMAAANIGHVNQCVKVHAEVSCPDMRSWSGISYPFNKLAYAIGDGTTPAGNTHIVCLGGAHNHIQPEEDVEATKMAVENMSPGNMDIKRLVFHNWCKDEFAKGAWFFAPPQLLSKSLDELRCRHGNVLFANSDWALGWRGFIDGAIEEGTRAAVTVIEELRPAPAVRSHL

SEQ ID NO: 407 - DNA, 1485 bp, synthetic construct
  misc_feature 1..1485: note = Variant of monoamine oxidase
  source 1..1485: mol_type = other DNA
atgaccagccgcgacggctatcagtggaccccggaaacgggtctgacccagggcgtaccgtccctgggtgtcatttcgccgccgactaacatcgaagataccgataaggacgggccttgggatgtcattgtcattgggggcgggtattgtgggctgaccgcaacccgtgatttaaccgtcgcagggttcaagacgctgctgctggaggcccgtgatcgtattggtggccgctcctggagcagtaatattgacggttacccgtatgagatgggtggcacttgggttcattggcatcaatctcacgtgtggcgtgaaatcacgcgttataaaatgcacaacgcgctgtctccatcatttaacttttcacgtggcgtgaatcacttccaactgcgtaccaatccgaccaccagtacgtacatgacgcacgaagcggaggatgaactgctgcgtagcgcattgcataaattcaccaatgtcgacggcactaatggccgtacagtgttgccgttcccacatgatatgttttatgtgccggaatttcgcaagtatgacgaaatgtcatattccgaacgcattgaccagatccgcgacgaactgtctttgaacgaacgctctagtttagaggctttcattttattatgtagcggtggcaccctggaaaactccagctttggtgaatttctgcattggtgggcaatgtcgggttacacgtatcagggctgtatggattgtttaatctcctataaatttaaggatggcgctagtgcgttcgcgcgtcgcttctgggaagaagccgctggcactggccgtctgggctatgtctttggttgtccggtgcgttctgtggtgaacgaacgcgacgcagtacgtgttaccgcacgtgacggtcgcgaattcgcagcgaaacgtttggtttgcacgattccgctgaacgtattgagttctgttcattttagcccaccactgtccccgcaacgcatggccgctgcgaacattggccatgttaaccagtgcgtcaaagtgcatgcggaagtcagttgtccggatatgcgttcatggtcgggtatctcctatccgttcaacaaattagcctacgctatcggcgatggcacgaccccagcgggtaatacgcatattgtgtgccttgggggggcccataatcatatccagccggaagaggacgtggaagcaacgaagatggccgttgaaaacatgtcgcctgggaatatggatatcaaacgtctggtcttccacaactggtgcaaggatgaatttgccaaaggcgcgtggttcttcgcccctccacagctgctgtcaaagagcctggatgaactgcgctgccgtcacggtaatgtcctgtttgcaaactccgattgggccttaggttggcgtggttttatcgatggtgctatcgaggagggcacccgcgcagcggttactgtaattgaggaactgcgtcctgcgcctgcggtgcgttcccacctg

SEQ ID NO: 408 - protein, 495 aa, synthetic construct
  REGION 1..495: note = Variant of monoamine oxidase
MTSRDGYQWTPETGLTQGVPSLGVISPPTNIEDTDKDGPWDVIVIGGGYCGLTATRDLTVAGFKTLLLEARDRIGGRSWSSNIDGYPYEMGGTWVHWHQSHVWREITRYKMHNALSPSFNFSRGVNHFQLRTNPTTSTYMTHEAEDELLRSALHKFTNVDGTNGRTVLPFPHDMFYVPEFRKYDEMSYSERIDQIRDELSLNERSSLEAFILLCSGGTLENSSFGEFLHWWAMSGYTYQGCMDCLISYKFKDGASAFARRFWEEAAGTGRLGYVFGCPVRSVVNERDAVRVTARDGREFAAKRLVCTIPLNVLSSVHFSPPLSPQRMAAANIGHVNQCVKVHAEVSCPDMRSWSGISYPFNKLAYAIGDGTTPAGNTHIVCLGGAHNHIQPEEDVEATKMAVENMSPGNMDIKRLVFHNWCKDEFAKGAWFFAPPQLLSKSLDELRCRHGNVLFANSDWALGWRGFIDGAIEEGTRAAVTVIEELRPAPAVRSHL

SEQ ID NO: 409 - DNA, 1485 bp, synthetic construct
  misc_feature 1..1485: note = Variant of monoamine oxidase
  source 1..1485: mol_type = other DNA
atgaccagccgcgacggctatcagtggaccccggaaacgggtctgacccagggcgtaccgtccctgggtgtcatttcgccgccgactaacatcgaagataccgataaggacgggccttgggatgtcattgtcattgggggcgggtattgtgggctgaccgcaacccgtgatttaaccgtcgcagggttcaagacgctgctgctggaggcccgtgatcgtattggtggccgctcctggagcagtaatattgacggttacccgtatgagatgggtggcacttgggttcattggcatcaatctcacgtgtggcgtgaaatcacgcgttataaaatgcacaacgcgctgtctccatcatttaacttttcacgtggcgtgaatcacttccaactgcgtaccaatccgaccaccagtacgtacatgacgcacgaagcggaggatgaactgctgcgtagcgcattgcataaattcaccaatgtcgacggcactaatggccgtgaggtgttgccgttcccacatgatatgttttatgtgccggaatttcgcaagtatgacgaaatgtcatattccgaacgcattgaccagatccgcgacgaactgtctttgaacgaacgctctagtttagaggctttcattttattatgtagcggtggcaccctggaaaactccagctttggtgaatttctgcattggtgggcaatgtcgggttacacgtatcagggctgtatggattgtttaatctcctataaatttaaggatggccagagtgcgttcgcgcgtcgcttctgggaagaagccgctggcactggccgtctgggctatgtctttggttgtccggtgcgttctgtggtgaacgaacgcgacgcagtacgtgttaccgcacgtgacggtcgcgaattcgcagcgaaacgtttggtttgcacgattccgctgaacgtattgagttctgttcattttagcccaccactgtccccgcaacgcatggccgctgcgaacattggccatgttaaccagtgcgtcaaagtgcatgcggaagtcagttgtccggatatgcgttcatggtcgggtatctcctatccgttcaacaaattagcctacgctatcggcgatggcacgaccccagcgggtaatacgcatattgtgtgccttgggggggcccataatcatatccagccggaagaggacgtggaagcaacgaagatggccgttgaaaacatgtcgcctgggaatatggatatcaaacgtctggtcttccacaactggtgcaaggatgaatttgccaaaggcgcgtggttcttcgcccctccacagctgctgtcaaagagcctggatgaactgcgctgccgtcacggtaatgtcctgtttgcaaactccgattgggccttaggttggcgtggttttatcgatggtgctatcgaggagggcacccgcgcagcggttactgtaattgaggaactgcgtcctgcgcctgcggtgcgttcccacctg

SEQ ID NO: 410 - protein, 495 aa, synthetic construct
  REGION 1..495: note = Variant of monoamine oxidase
MTSRDGYQWTPETGLTQGVPSLGVISPPTNIEDTDKDGPWDVIVIGGGYCGLTATRDLTVAGFKTLLLEARDRIGGRSWSSNIDGYPYEMGGTWVHWHQSHVWREITRYKMHNALSPSFNFSRGVNHFQLRTNPTTSTYMTHEAEDELLRSALHKFTNVDGTNGREVLPFPHDMFYVPEFRKYDEMSYSERIDQIRDELSLNERSSLEAFILLCSGGTLENSSFGEFLHWWAMSGYTYQGCMDCLISYKFKDGQSAFARRFWEEAAGTGRLGYVFGCPVRSVVNERDAVRVTARDGREFAAKRLVCTIPLNVLSSVHFSPPLSPQRMAAANIGHVNQCVKVHAEVSCPDMRSWSGISYPFNKLAYAIGDGTTPAGNTHIVCLGGAHNHIQPEEDVEATKMAVENMSPGNMDIKRLVFHNWCKDEFAKGAWFFAPPQLLSKSLDELRCRHGNVLFANSDWALGWRGFIDGAIEEGTRAAVTVIEELRPAPAVRSHL

SEQ ID NO: 411 - DNA, 1485 bp, synthetic construct
  misc_feature 1..1485: note = Variant of monoamine oxidase
  source 1..1485: mol_type = other DNA
atgaccagccgcgacggctatcagtggaccccggaaacgggtctgacccagggcgtaccgtccctgggtgtcatttcgccgccgactaacatcgaagataccgataaggacgggccttgggatgtcattgtcattgggggcgggtattgtgggctgaccgcaacccgtgatttaaccgtcgcagggttcaagacgctgctgctggaggcccgtgatcgtattggtggccgctcctggagcagtaatattgacggttacccgtatgagatgggtggcacttgggttcattggcatcaatctcacgtgtggcgtgaaatcacgcgttataaaatgcacaacgcgctgtctccatcatttaacttttcacgtggcgtgaatcacttccaactgcgtaccaatccgaccaccagtacgtacatgacgcacgaagcggaggatgaactgctgcgtagcgcattgcataaattcaccaatgtcgacggcactaatggccgtacagtgttgccgttcccacatgatatgttttatgtgccggaatttcgcaagtatgacgaaatgtcatattccgaacgcattgaccagatccgcgacgaactgtctttgaacgaacgctctagtttagaggctttcattttattatgtagcggtggcaccctggaaaactccagctttggtgaatttctgcattggtgggcaatgtcgggttacacgtatcagggctgtatggattgtttaatctcctataaatttaaggctggccagagtgcgttcgcgcgtcgcttctgggaagaagccgctggcactggccgtctgggctatgtctttggttgtccggtgcgttctgtggtgaacgaacgcgacgcagtacgtgttaccgcacgtgacggtcgcgaattcgcagcgaaacgtttggtttgcacgattccgctgaacgtattgagttctgttcattttagcccaccactgtccccgcaacgcatggccgctgcgaacattggccatgttaaccagtgcgtcaaagtgcatgcggaagtcagttgtccggatatgcgttcatggtcgggtatctcctatccgttcaacaaattagcctacgctatcggcgatggcacgaccccagcgggtaatacgcatattgtgtgccttgggggggcccataatcatatccagccggaagaggacgtggaagcaacgaagatggccgttgaaaacatgtcgcctgggaatatggatatcaaacgtctggtcttccacaactggtgcaaggatgaatttgccaaaggcgcgtggttcttcgcccctccacagctgctgtcaaagagcctggatgaactgcgctgccgtcacggtaatgtcctgtttgcaaactccgattgggccttaggttggcgtggttttatcgatggtgctatcgaggagggcacccgcgcagcggttactgtaattgaggaactgcgtcctgcgcctgcggtgcgttcccacctg

SEQ ID NO: 412 - protein, 495 aa, synthetic construct
  REGION 1..495: note = Variant of monoamine oxidase
MTSRDGYQWTPETGLTQGVPSLGVISPPTNIEDTDKDGPWDVIVIGGGYCGLTATRDLTVAGFKTLLLEARDRIGGRSWSSNIDGYPYEMGGTWVHWHQSHVWREITRYKMHNALSPSFNFSRGVNHFQLRTNPTTSTYMTHEAEDELLRSALHKFTNVDGTNGRTVLPFPHDMFYVPEFRKYDEMSYSERIDQIRDELSLNERSSLEAFILLCSGGTLENSSFGEFLHWWAMSGYTYQGCMDCLISYKFKAGQSAFARRFWEEAAGTGRLGYVFGCPVRSVVNERDAVRVTARDGREFAAKRLVCTIPLNVLSSVHFSPPLSPQRMAAANIGHVNQCVKVHAEVSCPDMRSWSGISYPFNKLAYAIGDGTTPAGNTHIVCLGGAHNHIQPEEDVEATKMAVENMSPGNMDIKRLVFHNWCKDEFAKGAWFFAPPQLLSKSLDELRCRHGNVLFANSDWALGWRGFIDGAIEEGTRAAVTVIEELRPAPAVRSHL

SEQ ID NO: 413 - DNA, 1485 bp, synthetic construct; identical to SEQ ID NO: 19
  misc_feature 1..1485: note = Variant of monoamine oxidase
  source 1..1485: mol_type = other DNA

SEQ ID NO: 414 - protein, 495 aa, synthetic construct; identical to SEQ ID NO: 20
  REGION 1..495: note = Variant of monoamine oxidase

SEQ ID NO: 415 - DNA, 1485 bp, synthetic construct
  misc_feature 1..1485: note = Variant of monoamine oxidase
  source 1..1485: mol_type = other DNA
atgaccagccgcgacggctatcagtggaccccggaaacgggtctgacccagggcgtaccgtccctgggtgtcatttcgccgccgactaacatcgaagataccgataaggacgggccttgggatgtcattgtcattgggggcgggtattgtgggctgaccgcaacccgtgatttaaccgtcgcagggttcaagacgctgctgctggaggcccgtgatcgtattggtggccgctcctggagcagtaacattgacggttacctgtatgagatgggtggcacttgggttcattggcatcaatctcacgtgtggcgtgaaatcacgcgttataaaatgcacaacgcgctgtctccatcatttaacttttcacgtggcgtgaatcacttccaactgcgtaccaatccgaccaccagtacgtacatgacgcacgaagcggaggatgaactgctgcgtagcgcattgcataaattcaccaatgtcgacggcactaatggccgtacagtgttgccgttcccacatgatatgttttatgtgccggaatttcgcaagtatgacgaaatgtcatattccgaacgcattgaccagatccgcgacgaactgtctttgaacgaacgctctagtttagaggctttcattttattatgtagcggtggcaccctggaaaactccagctttggtgaatttctgcattggtgggcaatgtcgggttacacgtatcagggctgtatggattgtttaatctcctataaatttaaggatggccagagtgcgttcgcgcgtcgcttctgggaagaagccgctggcactggccgtctgggctatgtctttggttgtccggtgcgttctgtggtgaacgaacgcgacgcagtacgtgttaccgcacgtgacggtcgcgaattcgcagcgaaacgtttggtttgcacgattccgctgaacgtattgagttctgttcattttagcccaccactgtccccgcaacgcatggccgctgcgaacattggccatgttaaccagtgcgtcaaagtgcatgcggaagtcagttgtccggatatgcgttcatggtcgggtatctcctatccgttcaacaaattagcctacgctatcggcgatggcacgaccccagcgggtaatacgcatattgtgtgccttgggggggcccataatcatatccagccggaagaggacgtggaagcaacgaagatggccgttgaaaacatgtcgcctgggaatatggatatcaaacgtctggtcttccataactggagcaaggatgaatttgccaaaggcgcgtggttcttcgcccctccacagctgctgtcaaagagcctggatgaactgcgctgccgtcacggtaatgtcctgtttgcaaactccgattgggccttaggttggcgtggttttatcgatggtgctatcgaggagggcacccgcgcagcggttactgtaattgaggaactgcgtcctgcgcctgcggtgcgttcccacctg

SEQ ID NO: 416 - protein, 495 aa, synthetic construct
  REGION 1..495: note = Variant of monoamine oxidase
MTSRDGYQWTPETGLTQGVPSLGVISPPTNIEDTDKDGPWDVIVIGGGYCGLTATRDLTVAGFKTLLLEARDRIGGRSWSSNIDGYLYEMGGTWVHWHQSHVWREITRYKMHNALSPSFNFSRGVNHFQLRTNPTTSTYMTHEAEDELLRSALHKFTNVDGTNGRTVLPFPHDMFYVPEFRKYDEMSYSERIDQIRDELSLNERSSLEAFILLCSGGTLENSSFGEFLHWWAMSGYTYQGCMDCLISYKFKDGQSAFARRFWEEAAGTGRLGYVFGCPVRSVVNERDAVRVTARDGREFAAKRLVCTIPLNVLSSVHFSPPLSPQRMAAANIGHVNQCVKVHAEVSCPDMRSWSGISYPFNKLAYAIGDGTTPAGNTHIVCLGGAHNHIQPEEDVEATKMAVENMSPGNMDIKRLVFHNWSKDEFAKGAWFFAPPQLLSKSLDELRCRHGNVLFANSDWALGWRGFIDGAIEEGTRAAVTVIEELRPAPAVRSHL

SEQ ID NO: 417 - DNA, 1485 bp, synthetic construct
  misc_feature 1..1485: note = Variant of monoamine oxidase
  source 1..1485: mol_type = other DNA
atgaccagccgcgacggctatcagtggaccccggaaacgggtctgacccagggcgtaccgtccctgggtgtcatttcgccgccgactaacatcgaagataccgataaggacgggccttgggatgtcattgtcattgggggcgggtattgtgggctgaccgcaacccgtgatttaaccgtcgcagggttcaagacgctgctgctggaggcccgtgatcgtattggtggccgctcctggagcagtcgcattgacggttacggttatgagatgggtggcacttgggttcattggcatcaatctcacgtgtggcgtgaaatcacgcgttataaaatgcacaacgcgctgtctccatcatttaacttttcacgtggcgtgaatcacttccaactgcgtaccaatccgaccaccagtacgtacatgacgcacgaagcggaggatgaactgctgcgtagcgcattgcataaattcaccaatgtcgacggcactaatggccgtacagtgttgccgttcccacatgatatgttttatgtgccggaatttcgcaagtatgacgaaatgtcatattccgaacgcattgaccagatccgcgacgaactgtctttgaacgaacgctctagtttagaggctttcattttattatgtagcggtggcaccctggaaaactccagctttggtgaatttctgcattggtgggcaatgtcgggttacacgtatcagggctgtatggattgtttaatctcctataaatttaaggatggccagagtgcgttcgcgcgtcgcttctgggaagaagccgctggcactggccgtctgggctatgtctttggttgtccggtgcgttctgtggtgaacgaacgcgacgcagtacgtgttaccgcacgtgacggtcgcgaattcgcagcgaaacgtttggtttgcacgattccgctgaacgtattgagttctgttcattttagcccaccactgtccccgcaacgcatggccgctgcgaacattggccatgttaaccagtgcgtcaaagtgcatgcggaagtcagttgtccggatatgcgttcatggtcgggtatctcctatccgttcaacaaattagcctacgctatcggcgatggcacgaccccagcgggtaatacgcatattgtgtgccttgggggggcccataatcatatccagccggaagaggacgtggaagcaacgaagatggccgttgaaaacatgtcgcctgggaatatggatatcaaacgtctggtcttccataactggtgcaaggatgaatttgccaaaggcgcgtggttcttcgcccctccacagctgctgtcaaagagcctggatgaactgcgctgccgtcacggtaatgtcctgtttgcaaactccgattgggccttaggttggcgtggttttatcgatggtgctatcgaggagggcacccgcgcagcggttactgtaattgaggaactgcgtcctgcgcctgcggtgcgttcccacctg

SEQ ID NO: 418 - protein, 495 aa, synthetic construct
  REGION 1..495: note = Variant of monoamine oxidase
MTSRDGYQWTPETGLTQGVPSLGVISPPTNIEDTDKDGPWDVIVIGGGYCGLTATRDLTVAGFKTLLLEARDRIGGRSWSSRIDGYGYEMGGTWVHWHQSHVWREITRYKMHNALSPSFNFSRGVNHFQLRTNPTTSTYMTHEAEDELLRSALHKFTNVDGTNGRTVLPFPHDMFYVPEFRKYDEMSYSERIDQIRDELSLNERSSLEAFILLCSGGTLENSSFGEFLHWWAMSGYTYQGCMDCLISYKFKDGQSAFARRFWEEAAGTGRLGYVFGCPVRSVVNERDAVRVTARDGREFAAKRLVCTIPLNVLSSVHFSPPLSPQRMAAANIGHVNQCVKVHAEVSCPDMRSWSGISYPFNKLAYAIGDGTTPAGNTHIVCLGGAHNHIQPEEDVEATKMAVENMSPGNMDIKRLVFHNWCKDEFAKGAWFFAPPQLLSKSLDELRCRHGNVLFANSDWALGWRGFIDGAIEEGTRAAVTVIEELRPAPAVRSHL

SEQ ID NO: 419 - DNA, 1485 bp, synthetic construct
  misc_feature 1..1485: note = Variant of monoamine oxidase
  source 1..1485: mol_type = other DNA
atgaccagccgcgacggctatcagtggaccccggaaacgggtctgacccagggcgtaccgtccctgggtgtcatttcgccgccgactaacatcgaagataccgataaggacgggccttgggatgtcattgtcattgggggcgggtattgtgggctgaccgcaacccgtgatttaaccgtcgcagggttcaagacgctgctgctggaggcccgtgatcgtattggtggccgctcctggagcagttttattgacggttacggttatgagatgggtggcacttgggttcattggcatcaatctcacgtgtggcgtgaaatcacgcgttataaaatgcacaacgcgctgtctccatcatttaacttttcacgtggcgtgaatcacttccaactgcgtaccaatccgaccaccagtacgtacatgacgcacgaagcggaggatgaactgctgcgtagcgcattgcataaattcaccaatgtcgacggcactaatggccgtacagtgttgccgttcccacatgatatgttttatgtgccggaatttcgcaagtatgacgaaatgtcatattccgaacgcattgaccagatccgcgacgaactgtctttgaacgaacgctctagtttagaggctttcattttattatgtagcggtggcggcctggaaaactccagctttggtgaatttctgcattggtgggcaatgtcgggttacacgtatcagggctgtatggattgtttaatctcctataaatttaaggatggccagagtgcgttcgcgcgtcgcttctgggaagaagccgctggcactggccgtctgggctatgtctttggttgtccggtgcgttctgtggtgaacgaacgcgacgcagtacgtgttaccgcacgtgacggtcgcgaattcgcagcgaaacgtttggtttgcacgattccgctgaacgtattgagttctgttcattttagcccaccactgtccccgcaacgcatggccgctgcgaacattggccatgttaaccagagcgtcaaagtgcatgcggaagtcagttgtccggatatgcgttcatggtcgggtatctcctatccgttcaacaaattagcctacgctatcggcgatggcacgaccccagcgggtaatacgcatattgtgtgccttgggggggcccataatcatatccagccggaagaggacgtggaagcaacgaagatggccgttgaaaacatgtcgcctgggaatatggatatcaaacgtctggtcttccacaactggtgcaaggatgaatttgccaaaggcgcgtggttcttcgcccctccacagctgctgtcaaagagcctggatgaactgcgctgccgtcacggtaatgtcctgtttgcaaactccgattgggccttaggttggcgtggttttatcgatggtgctatcgaggagggcacccgcgcagcggttactgtaattgaggaactgcgtcctgcgcctgcggtgcgttcccacctg

SEQ ID NO: 420 - protein, 495 aa, synthetic construct
  REGION 1..495: note = Variant of monoamine oxidase
MTSRDGYQWTPETGLTQGVPSLGVISPPTNIEDTDKDGPWDVIVIGGGYCGLTATRDLTVAGFKTLLLEARDRIGGRSWSSFIDGYGYEMGGTWVHWHQSHVWREITRYKMHNALSPSFNFSRGVNHFQLRTNPTTSTYMTHEAEDELLRSALHKFTNVDGTNGRTVLPFPHDMFYVPEFRKYDEMSYSERIDQIRDELSLNERSSLEAFILLCSGGGLENSSFGEFLHWWAMSGYTYQGCMDCLISYKFKDGQSAFARRFWEEAAGTGRLGYVFGCPVRSVVNERDAVRVTARDGREFAAKRLVCTIPLNVLSSVHFSPPLSPQRMAAANIGHVNQSVKVHAEVSCPDMRSWSGISYPFNKLAYAIGDGTTPAGNTHIVCLGGAHNHIQPEEDVEATKMAVENMSPGNMDIKRLVFHNWCKDEFAKGAWFFAPPQLLSKSLDELRCRHGNVLFANSDWALGWRGFIDGAIEEGTRAAVTVIEELRPAPAVRSHL

SEQ ID NO: 421 - DNA, 1485 bp, synthetic construct
  misc_feature 1..1485: note = Variant of monoamine oxidase
  source 1..1485: mol_type = other DNA
atgaccagccgcgacggctatcagtggaccccggaaacgggtctgacccagggcgtaccgtccctgggtgtcatttcgccgccgactaacatcgaagataccgataaggacgggccttgggatgtcattgtcattgggggcgggtattgtgggctgaccgcaacccgtgatttaaccgtcgcagggttcaagacgctgctgctggaggcccgtgatcgtattggtggccgctcctggagcagtaatattgacggttacggttatgagatgggtggcacttgggttcattggcatcaatctcacgtgtggcgtgaaatcacgcgttataaaatgcacaacgcgctgtctccgtcatttaacttttcacgtggcgtgaatcacttccaactgcgtaccaatccgaccaccagtacgtacatgacgcacgaagcggaggatgaactgctgcgtagcgcattgcataaattcaccaatgtcgacggcactaatggccgtacagtgttgccgttcccacatgatatgttttatgtgccggaatttcgcaagtatgacgaaatgtcatattccgaacgcattgaccagatccgcgacgaactgtctttgaacgaacgctctagtttagaggctttcattttattatgtagcggtggcggctcggaaaactccagctttggtgaatttctgcattggtgggcaatgtcgggttacacgtatcagggctgtatggattgtttaatctcctataaatttaaggatggccagagtgcgttcgcgcgtcgcttctgggaagaagccgctggcactggccgtctgggctatgtctttggttgtccggtgcgttctgtggtgaacgaacgcgacgcagtacgtgttaccgcacgtgacggtcgcgaattcgcagcgaaacgtttggtttgcacgattccgctgaacgtattgagttctgttcattttagcccaccactgtccccgcaacgcatggccgctgcgaacattggccatgttaaccagagcgtcaaagtgcatgcggaagtcagttgtccggatatgcgttcatggtcgggtatctcctatccgttcaacaaattagcctacgctatcggcgatggcacgaccccagcgggtaatacgcatattgtgtgccttgggggggcccataatcatatccagccggaagaggacgtggaagcaacgaagatggccgttgaaaacatgtcgcctgggaatatggatatcaaacgtctggtcttccacaactggtgcaaggatgaatttgccaaaggcgcgtggttcttcgcccctccacagctgctgtcaaagagcctggatgaactgcgctgccgtcacggtaatgtcctgtttgcaaactccgattgggccttaggttggcgtggttttatcgatggtgctatcgaggagggcacccgcgcagcggttactgtaattgaggaactgcgtcctgcgcctgcggtgcgttcccacctg

SEQ ID NO: 422 - protein, 495 aa, synthetic construct
  REGION 1..495: note = Variant of monoamine oxidase
MTSRDGYQWTPETGLTQGVPSLGVISPPTNIEDTDKDGPWDVIVIGGGYCGLTATRDLTVAGFKTLLLEARDRIGGRSWSSNIDGYGYEMGGTWVHWHQSHVWREITRYKMHNALSPSFNFSRGVNHFQLRTNPTTSTYMTHEAEDELLRSALHKFTNVDGTNGRTVLPFPHDMFYVPEFRKYDEMSYSERIDQIRDELSLNERSSLEAFILLCSGGGSENSSFGEFLHWWAMSGYTYQGCMDCLISYKFKDGQSAFARRFWEEAAGTGRLGYVFGCPVRSVVNERDAVRVTARDGREFAAKRLVCTIPLNVLSSVHFSPPLSPQRMAAANIGHVNQSVKVHAEVSCPDMRSWSGISYPFNKLAYAIGDGTTPAGNTHIVCLGGAHNHIQPEEDVEATKMAVENMSPGNMDIKRLVFHNWCKDEFAKGAWFFAPPQLLSKSLDELRCRHGNVLFANSDWALGWRGFIDGAIEEGTRAAVTVIEELRPAPAVRSHL

SEQ ID NO: 423 - DNA, 1485 bp, synthetic construct
  misc_feature 1..1485: note = Variant of monoamine oxidase
  source 1..1485: mol_type = other DNA
atgaccagccgcgacggctatcagtggaccccggaaacgggtctgacccagggcgtaccgtccctgggtgtcatttcgccgccgactaacatcgaagataccgataaggacgggccttgggatgtcattgtcattgggggcgggtattgtgggctgaccgcaacccgtgatttaaccgtcgcagggttcaagacgctgctgctggaggcccgtgatcgtattggtggccgctcctggagcagtcgcattgacggttacccgtatgagatgggtggcacttgggttcattggcatcaatctcacgtgtggcgtgaaatcacgcgttataaaatgcacaacgcgctgtctccatcatttaacttttcacgtggcgtgaatcacttccaactgcgtaccaatccgaccaccagtacgtacatgacgcacgaagcggaggatgaactgctgcgtagcgcattgcataaattcaccaatgtcgacggcactaatggccgtacagtgttgccgttcccacatgatatgttttatgtgccggaatttcgcaagtatgacgaaatgtcatattccgaacgcattgaccagatccgcgacgaactgtctttgaacgaacgctctagtttagaggctttcattttattatgtagcggtggcaccctggaaaactccagctttggtgaatttctgcattggtgggcaatgtcgggttacacgtatcagggctgtatggattgtttaatctcctataaatttaaggatggccagagtgcgttcgcgcgtagcttctgggaagaagccgctggcactggccgtctgggctatgtctttggttgtccggtgcgttctgtggtgaacgaacgcgacgcagtacgtgttaccgcacgtgacggtcgcgaattcgcagcgaaacgtttggtttgcacgattccgctgaacgtattgagttctgttcattttagcccaccactgtccccgcaacgcatggccgctgcgaacattggccatgttaaccaggctgtcaaagtgcatgcggaagtcagttgtccggatatgcgttcatggtcgggtatctcctatccgttcaacaaattagcctacgctatcggcgatggcacgaccccagcgggtaatacgcatattgtgtgccttgggggggcccataatcatatccagccggaagaggacgtggaagcaacgaagatggccgttgaaaacatgtcgcctgggaatatggatatcaaacgtctggtcttccataactggagcaaggatgaatttgccaaaggcgcgtggttcttcgcccctccacagctgctgtcaaagagcctggatgaactgcgctgccgtcacggtaatgtcctgtttgcaaactccgattgggccttaggttggcgtggttttatcgatggtgctatcgaggagggcacccgcgcagcggttactgtaattgaggaactgcgtcctgcgcctgcggtgcgttcccacctg

SEQ ID NO: 424 - protein, 495 aa, synthetic construct
  REGION 1..495: note = Variant of monoamine oxidase
MTSRDGYQWTPETGLTQGVPSLGVISPPTNIEDTDKDGPWDVIVIGGGYCGLTATRDLTVAGFKTLLLEARDRIGGRSWSSRIDGYPYEMGGTWVHWHQSHVWREITRYKMHNALSPSFNFSRGVNHFQLRTNPTTSTYMTHEAEDELLRSALHKFTNVDGTNGRTVLPFPHDMFYVPEFRKYDEMSYSERIDQIRDELSLNERSSLEAFILLCSGGTLENSSFGEFLHWWAMSGYTYQGCMDCLISYKFKDGQSAFARSFWEEAAGTGRLGYVFGCPVRSVVNERDAVRVTARDGREFAAKRLVCTIPLNVLSSVHFSPPLSPQRMAAANIGHVNQAVKVHAEVSCPDMRSWSGISYPFNKLAYAIGDGTTPAGNTHIVCLGGAHNHIQPEEDVEATKMAVENMSPGNMDIKRLVFHNWSKDEFAKGAWFFAPPQLLSKSLDELRCRHGNVLFANSDWALGWRGFIDGAIEEGTRAAVTVIEELRPAPAVRSHL

SEQ ID NO: 425 - DNA, 1485 bp, synthetic construct
  misc_feature 1..1485: note = Variant of monoamine oxidase
  source 1..1485: mol_type = other DNA
atgaccagccgcgacggctatcagtggaccccggaaacgggtctgacccagggcgtaccgtccctgggtgtcatttcgccgccgactaacatcgaagataccgataaggacgggccttgggatgtcattgtcattgggggcgggtattgtgggctgaccgcaacccgtgatttaaccgtcgcagggttcaagacgctgctgctggaggcccgtgatcgtattggtggccgctcctggagcagttttattgacggttacctgtatgagatgggtggcacttgggttcattggcatcaatctcacgtgtggcgtgaaatcacgcgttataaaatgcacaacgcgctgtctccgtcatttaacttttcacgtggcgtgaatcacttccaactgcgtaccaatccgaccaccagtacgtacatgacgcacgaagcggaggatgaactgctgcgtagcgcattgcataaattcaccaatgtcgacggcactaatggccgtacagtgttgccgttcccacatgatatgttttatgtgccggaatttcgcaagtatgacgaaatgtcatattccgaacgcattgaccagatccgcgacgaactgtctttgaacgaacgctctagtttagaggctttcattttattatgtagcggtggcaccctggaaaactccagctttggtgaatttctgcattggtgggcaatgtcgggttacacgtatcagggctgtatggattgtttaatctcctataaatttaaggatggccagagtgcgttcgcgcgtcgcttctgggaagaagccgctggcactggccgtctgggctatgtctttggttgtccggtgcgttctgtggtgaacgaacgcgacgcagtacgtgttaccgcacgtgacggtcgcgaattcgcagcgaaacgtttggtttgcacgattccgctgaacgtattgagttctgttcattttagcccaccactgtccccgcaacgcatggccgctgcgaacattggccatgttaaccagtgcgtcaaagtgcatgcggaagtcagttgtccggatatgcgttcatggtcgggtatctcctatccgttcaacaaattagcctacgctatcggcgatggcacgaccccagcgggtaatacgcatattgtgtgccttgggggggcccataatcatatccagccggaagaggacgtggaagcaacgaagatggccgttgaaaacatgtcgcctgggaatatggatatcaaacgtctggtcttccacaactggtgcaaggatgaatttgccaaaggcgcgtggttcttcgcccctccacagctgctgtcaaagagcctggatgaactgcgctgccgtcacggtaatgtcctgtttgcaaactccgattgggccttaggttggcgtggttttatcgatggtgctatcgaggagggcacccgcgcagcggttactgtaattgaggaactgcgtcctgcgcctgcggtgcgttcccacctg

SEQ ID NO: 426 - protein, 495 aa, synthetic construct
  REGION 1..495: note = Variant of monoamine oxidase
MTSRDGYQWTPETGLTQGVPSLGVISPPTNIEDTDKDGPWDVIVIGGGYCGLTATRDLTVAGFKTLLLEARDRIGGRSWSSFIDGYLYEMGGTWVHWHQSHVWREITRYKMHNALSPSFNFSRGVNHFQLRTNPTTSTYMTHEAEDELLRSALHKFTNVDGTNGRTVLPFPHDMFYVPEFRKYDEMSYSERIDQIRDELSLNERSSLEAFILLCSGGTLENSSFGEFLHWWAMSGYTYQGCMDCLISYKFKDGQSAFARRFWEEAAGTGRLGYVFGCPVRSVVNERDAVRVTARDGREFAAKRLVCTIPLNVLSSVHFSPPLSPQRMAAANIGHVNQCVKVHAEVSCPDMRSWSGISYPFNKLAYAIGDGTTPAGNTHIVCLGGAHNHIQPEEDVEATKMAVENMSPGNMDIKRLVFHNWCKDEFAKGAWFFAPPQLLSKSLDELRCRHGNVLFANSDWALGWRGFIDGAIEEGTRAAVTVIEELRPAPAVRSHL

SEQ ID NO: 427 - DNA, 1485 bp, synthetic construct
  misc_feature 1..1485: note = Variant of monoamine oxidase
  source 1..1485: mol_type = other DNA
atgaccagccgcgacggctatcagtggaccccggaaacgggtctgacccagggcgtaccgtccctgggtgtcatttcgccgccgactaacatcgaagataccgataaggacgggccttgggatgtcattgtcattgggggcgggtattgtgggctgaccgcaacccgtgatttaaccgtcgcagggttcaagacgctgctgctggaggcccgtgatcgtattggtggccgctcctggagcagtaacattgacggttacggttatgagatgggtggcacttgggttcattggcatcaatctcacgtgtggcgtgaaatcacgcgttataaaatgcacaacgcgctgtctccgtcatttaacttttcacgtggcgtgaatcacttccaactgcgtaccaatccgaccaccagtacgtacatgacgcacgaagcggaggatgaactgctgcgtagcgcattgcataaattcaccaatgtcgacggcactaatggccgtacagtgttgccgttcccacatgatatgttttatgtgccggaatttcgcaagtatgacgaaatgtcatattccgaacgcattgaccagatccgcgacgaactgtctttgaacgaacgctctagtttagaggctttcattttattatgtagcggtggcaccctggaaaactccagctttggtgaatttctgcattggtgggcaatgtcgggttacacgtatcagggctgtatggattgtttaatctcctataaatttaaggatggccagagtgcgttcgcgcgtagcttctgggaagaagccgctggcactggccgtctgggctatgtctttggttgtccggtgcgttctgtggtgaacgaacgcgacgcagtacgtgttaccgcacgtgacggtcgcgaattcgcagcgaaacgtttggtttgcacgattccgctgaacgtattgagttctgttcattttagcccaccactgtccccgcaacgcatggccgctgcgaacattggccatgttaaccagtgcgtcaaagtgcatgcggaagtcagttgtccggatatgcgttcatggtcgggtatctcctatccgttcaacaaattagcctacgctatcggcgatggcacgaccccagcgggtaatacgcatattgtgtgccttgggggggcccataatcatatccagccggaagaggacgtggaagcaacgaagatggccgttgaaaacatgtcgcctgggaatatggatatcaaacgtctggtcttccataactggtgcaaggatgaatttgccaaaggcgcgtggttcttcgcccctccacagctgctgtcaaagagcctggatgaactgcgctgccgtcacggtaatgtcctgtttgcaaactccgattgggccttaggttggcgtggttttatcgatggtgctatcgaggagggcacccgcgcagcggttactgtaattgaggaactgcgtcctgcgcctgcggtgcgttcccacctg

SEQ ID NO: 428 - protein, 495 aa, synthetic construct
  REGION 1..495: note = Variant of monoamine oxidase
MTSRDGYQWTPETGLTQGVPSLGVISPPTNIEDTDKDGPWDVIVIGGGYCGLTATRDLTVAGFKTLLLEARDRIGGRSWSSNIDGYGYEMGGTWVHWHQSHVWREITRYKMHNALSPSFNFSRGVNHFQLRTNPTTSTYMTHEAEDELLRSALHKFTNVDGTNGRTVLPFPHDMFYVPEFRKYDEMSYSERIDQIRDELSLNERSSLEAFILLCSGGTLENSSFGEFLHWWAMSGYTYQGCMDCLISYKFKDGQSAFARSFWEEAAGTGRLGYVFGCPVRSVVNERDAVRVTARDGREFAAKRLVCTIPLNVLSSVHFSPPLSPQRMAAANIGHVNQCVKVHAEVSCPDMRSWSGISYPFNKLAYAIGDGTTPAGNTHIVCLGGAHNHIQPEEDVEATKMAVENMSPGNMDIKRLVFHNWCKDEFAKGAWFFAPPQLLSKSLDELRCRHGNVLFANSDWALGWRGFIDGAIEEGTRAAVTVIEELRPAPAVRSHL

SEQ ID NO: 429 - DNA, 1485 bp, synthetic construct
  misc_feature 1..1485: note = Variant of monoamine oxidase
  source 1..1485: mol_type = other DNA
atgaccagccgcgacggctatcagtggaccccggaaacgggtctgacccagggcgtaccgtccctgggtgtcatttcgccgccgactaacatcgaagataccgataaggacgggccttgggatgtcattgtcattgggggcgggtattgtgggctgaccgcaacccgtgatttaaccgtcgcagggttcaagacgctgctgctggaggcccgtgatcgtattggtggccgctcctggagcagttttattgacggttacctgtatgagatgggtggcacttgggttcattggcatcaatctcacgtgtggcgtgaaatcacgcgttataaaatgcacaacgcgctgtctccatcatttaacttttcacgtggcgtgaatcacttccaactgcgtaccaatccgaccaccagtacgtacatgacgcacgaagcggaggatgaactgctgcgtagcgcattgcataaattcaccaatgtcgacggcactaatggccgtacagtgttgccgttcccacatgatatgttttatgtgccggaatttcgcaagtatgacgaaatgtcatattccgaacgcattgaccagatccgcgacgaactgtctttgaacgaacgctctagtttagaggctttcattttattatgtagcggtggcacctcggaaaactccagctttggtgaatttctgcattggtgggcaatgtcgggttacacgtatcagggctgtatggattgtttaatctcctataaatttaaggatggccagagtgcgttcgcgcgtcgcttctgggaagaagccgctggcactggccgtctgggctatgtctttggttgtccggtgcgttctgtggtgaacgaacgcgacgcagtacgtgttaccgcacgtgacggtcgcgaattcgcagcgaaacgtttggtttgcacgattccgctgaacgtattgagttctgttcattttagcccaccactgtccccgcaacgcatggccgctgcgaacattggccatgttaaccagtgcgtcaaagtgcatgcggaagtcagttgtccggatatgcgttcatggtcgggtatctcctatccgttcaacaaattagcctacgctatcggcgatggcacgaccccagcgggtaatacgcatattgtgtgccttgggggggcccataatcatatccagccggaagaggacgtggaagcaacgaagatggccgttgaaaacatgtcgcctgggaatatggatatcaaacgtctggtcttccataactggagcaaggatgaatttgccaaaggcgcgtggttcttcgcccctccacagctgctgtcaaagagcctggatgaactgcgctgccgtcacggtaatgtcctgtttgcaaactccgattgggccttaggttggcgtggttttatcgatggtgctatcgaggagggcacccgcgcagcggttactgtaattgaggaactgcgtcctgcgcctgcggtgcgttcccacctg

SEQ ID NO: 430 - protein, 495 aa, synthetic construct
  REGION 1..495: note = Variant of monoamine oxidase
MTSRDGYQWTPETGLTQGVPSLGVISPPTNIEDTDKDGPWDVIVIGGGYCGLTATRDLTVAGFKTLLLEARDRIGGRSWSSFIDGYLYEMGGTWVHWHQSHVWREITRYKMHNALSPSFNFSRGVNHFQLRTNPTTSTYMTHEAEDELLRSALHKFTNVDGTNGRTVLPFPHDMFYVPEFRKYDEMSYSERIDQIRDELSLNERSSLEAFILLCSGGTSENSSFGEFLHWWAMSGYTYQGCMDCLISYKFKDGQSAFARRFWEEAAGTGRLGYVFGCPVRSVVNERDAVRVTARDGREFAAKRLVCTIPLNVLSSVHFSPPLSPQRMAAANIGHVNQCVKVHAEVSCPDMRSWSGISYPFNKLAYAIGDGTTPAGNTHIVCLGGAHNHIQPEEDVEATKMAVENMSPGNMDIKRLVFHNWSKDEFAKGAWFFAPPQLLSKSLDELRCRHGNVLFANSDWALGWRGFIDGAIEEGTRAAVTVIEELRPAPAVRSHL

SEQ ID NO: 431 - DNA, 1485 bp, synthetic construct
  misc_feature 1..1485: note = Variant of monoamine oxidase
  source 1..1485: mol_type = other DNA
atgaccagccgcgacggctatcagtggaccccggaaacgggtctgacccagggcgtaccgtccctgggtgtcatttcgccgccgactaacatcgaagataccgataaggacgggccttgggatgtcattgtcattgggggcgggtattgtgggctgaccgcaacccgtgatttaaccgtcgcagggttcaagacgctgctgctggaggcccgtgatcgtattggtggccgctcctggagcagttttattgacggttacctgtatgagatgggtggcacttgggttcattggcatcaatctcacgtgtggcgtgaaatcacgcgttataaaatgcacggcgcgctgtctaaatcatttaacttttcacgtggcgtgaatcacttccaactgcgtaccaatccgaccaccagtacgtacatgacgcacgaagcggaggatgaactgctgcgtagcgcattgcataaattcaccaatgtcgacggcactaatggccgtacagtgttgccgttcccacatgatatgttttatgtgccggaatttcgcaagtatgacgaaatgtcatattccgaacgcattgaccagatccgcgacgaactgtctttgaacgaacgctctagtttagaggctttcattttattatgtagcggtggcggcctggaaaactccagctttggtgaatttctgcattggtgggcaatgtcgggttacacgtatcagggctgtatggattgtttaatctcctataaatttaaggatggccagagtgcgttcgcgcgtcgcttctgggaagaagccgctggcactggccgtctgggctatgtctttggttgtccggtgcgttctgtggtgaacgaacgcgacgcagtacgtgttaccgcacgtgacggtcgcgaattcgcagcgaaacgtttggtttgcacgattccgctgaacgtattgagttctgttcattttagcccaccactgtccccgcaacgcatggccgctgcgaacattggccatgttaaccagtgcgtcaaagtgcatgcggaagtcagttgtccggatatgcgttcatggtcgggtatctcctatccgttcaacaaattagcctacgctatcggcgatggcacgaccccagcgggtaatacgcatattgtgtgccttgggggggcccataatcatatccagccggaagaggacgtggaagcaacgaagatggccgttgaaaacatgtcgcctgggaatatggatatcaaacgtctggtcttccacaactggtgcaaggatgaatttgccaaaggcgcgtggttcttcgcccctccacagctgctgtcaaagagcctggatgaactgcgctgccgtcacggtaatgtcctgtttgcaaactccgattgggccttaggttggcgtggttttatcgatggtgctatcgaggagggcacccgcgcagcggttactgtaattgaggaactgcgtcctgcgcctgcggtgcgttcccacctg

SEQ ID NO: 432 - protein, 495 aa, synthetic construct
  REGION 1..495: note = Variant of monoamine oxidase
MTSRDGYQWTPETGLTQGVPSLGVISPPTNIEDTDKDGPWDVIVIGGGYCGLTATRDLTVAGFKTLLLEARDRIGGRSWSSFIDGYLYEMGGTWVHWHQSHVWREITRYKMHGALSKSFNFSRGVNHFQLRTNPTTSTYMTHEAEDELLRSALHKFTNVDGTNGRTVLPFPHDMFYVPEFRKYDEMSYSERIDQIRDELSLNERSSLEAFILLCSGGGLENSSFGEFLHWWAMSGYTYQGCMDCLISYKFKDGQSAFARRFWEEAAGTGRLGYVFGCPVRSVVNERDAVRVTARDGREFAAKRLVCTIPLNVLSSVHFSPPLSPQRMAAANIGHVNQCVKVHAEVSCPDMRSWSGISYPFNKLAYAIGDGTTPAGNTHIVCLGGAHNHIQPEEDVEATKMAVENMSPGNMDIKRLVFHNWCKDEFAKGAWFFAPPQLLSKSLDELRCRHGNVLFANSDWALGWRGFIDGAIEEGTRAAVTVIEELRPAPAVRSHL

SEQ ID NO: 433 - DNA, 1485 bp, synthetic construct
  misc_feature 1..1485: note = Variant of monoamine oxidase
  source 1..1485: mol_type = other DNA
atgaccagccgcgacggctatcagtggaccccggaaacgggtctgacccagggcgtaccgtccctgggtgtcatttcgccgccgactaacatcgaagataccgataaggacgggccttgggatgtcattgtcattgggggcgggtattgtgggctgaccgcaacccgtgatttaaccgtcgcagggttcaagacgctgctgctggaggcccgtgatcgtattggtggccgctcctggagcagtaacattgacggttacctgtatgagatgggtggcacttgggttcattggcatcaatctcacgtgtggcgtgaaatcacgcgttataaaatgcacaacgcgctgtctccatcatttaacttttcacgtggcgtgaatcacttccaactgcgtaccaatccgaccaccagtacgtacatgacgcacgaagcggaggatgaactgctgcgtagcgcattgcataaattcaccaatgtcgacggcactaatggccgtacagtgttgccgttcccacatgatatgttttatgtgccggaatttcgcaagtatgacgaaatgtcatattccgaacgcattgaccagatccgcgacgaactgtctttgaacgaacgctctagtttagaggctttcattttattatgtagcggtggcggcctggaaaactccagctttggtgaatttctgcattggtgggcaatgtcgggttacacgtatcagggctgtatggattgtttaatctcctataaatttaaggatggccagagtgcgttcgcgcgtcgcttctgggaagaagccgctggcactggccgtctgggctatgtctttggttgtccggtgcgttctgtggtgaacgaacgcgacgcagtacgtgttaccgcacgtgacggtcgcgaattcgcagcgaaacgtttggtttgcacgattccgctgaacgtattgagttctgttcattttagcccaccactgtccccgcaacgcatggccgctgcgaacattggccatgttaaccagtgcgtcaaagtgcatgcggaagtcagttgtccggatatgcgttcatggtcgggtatctcctatccgttcaacaaattagcctacgctatcggcgatggcacgaccccagcgggtaatacgcatattgtgtgccttgggggggcccataatcatatccagccggaagaggacgtggaagcaacgaagatggccgttgaaaacatgtcgcctgggaatatggatatcaaacgtctggtcttcgggaactggtgcaaggatgaatttgccaaaggcgcgtggttcttcgcccctccacagctgctgtcaaagagcctggatgaactgcgctgccgtcacggtaatgtcctgtttgcaaactccgattgggccttaggttggcgtggttttatcgatggtgctatcgaggagggcacccgcgcagcggttactgtaattgaggaactgcgtcctgcgcctgcggtgcgttcccacctg

SEQ ID NO: 434 - protein, 495 aa, synthetic construct
  REGION 1..495: note = Variant of monoamine oxidase
MTSRDGYQWTPETGLTQGVPSLGVISPPTNIEDTDKDGPWDVIVIGGGYCGLTATRDLTVAGFKTLLLEARDRIGGRSWSSNIDGYLYEMGGTWVHWHQSHVWREITRYKMHNALSPSFNFSRGVNHFQLRTNPTTSTYMTHEAEDELLRSALHKFTNVDGTNGRTVLPFPHDMFYVPEFRKYDEMSYSERIDQIRDELSLNERSSLEAFILLCSGGGLENSSFGEFLHWWAMSGYTYQGCMDCLISYKFKDGQSAFARRFWEEAAGTGRLGYVFGCPVRSVVNERDAVRVTARDGREFAAKRLVCTIPLNVLSSVHFSPPLSPQRMAAANIGHVNQCVKVHAEVSCPDMRSWSGISYPFNKLAYAIGDGTTPAGNTHIVCLGGAHNHIQPEEDVEATKMAVENMSPGNMDIKRLVFGNWCKDEFAKGAWFFAPPQLLSKSLDELRCRHGNVLFANSDWALGWRGFIDGAIEEGTRAAVTVIEELRPAPAVRSHL

SEQ ID NO: 435 - DNA, 1485 bp, synthetic construct
  misc_feature 1..1485: note = Variant of monoamine oxidase
  source 1..1485: mol_type = other DNA
atgaccagccgcgacggctatcagtggaccccggaaacgggtctgacccagggcgtaccgtccctgggtgtcatttcgccgccgactaacatcgaagataccgataaggacgggccttgggatgtcattgtcattgggggcgggtattgtgggctgaccgcaacccgtgatttaaccgtcgcagggttcaagacgctgctgctggaggcccgtgatcgtattggtggccgctcctggagcagtaacattgacggttacctgtatgagatgggtggcacttgggttcattggcatcaatctcacgtgtggcgtgaaatcacgcgttataaaatgcacggcgcgctgtctaaatcatttaacttttcacgtggcgtgaatcacttccaactgcgtaccaatccgaccaccagtacgtacatgacgcacgaagcggaggatgaactgctgcgtagcgcattgcataaattcaccaatgtcgacggcactaatggccgtacagtgttgccgttcccacatgatatgttttatgtgccggaatttcgcaagtatgacgaaatgtcatattccgaacgcattgaccagatccgcgacgaactgtctttgaacgaacgctctagtttagaggctttcattttattatgtagcggtggcaccctggaaaactccagctttggtgaatttctgcattggtgggcaatgtcgggttacacgtatcagggctgtatggattgtttaatctcctataaatttaaggatggccagagtgcgttcgcgcgtagcttctgggaagaagccgctggcactggccgtctgggctatgtctttggttgtccggtgcgttctgtggtgaacgaacgcgacgcagtacgtgttaccgcacgtgacggtcgcgaattcgcagcgaaacgtttggtttgcacgattccgctgaacgtattgagttctgttcattttagcccaccactgtccccgcaacgcatggccgctgcgaacattggccatgttaaccagagcgtcaaagtgcatgcggaagtcagttgtccggatatgcgttcatggtcgggtatctcctatccgttcaacaaattagcctacgctatcggcgatggcacgaccccagcgggtaatacgcatattgtgtgccttgggggggcccataatcatatccagccggaagaggacgtggaagcaacgaagatggccgttgaaaacatgtcgcctgggaatatggatatcaaacgtctggtcttccataactggagcaaggatgaatttgccaaaggcgcgtggttcttcgcccctccacagctgctgtcaaagagcctggatgaactgcgctgccgtcacggtaatgtcctgtttgcaaactccgattgggccttaggttggcgtggttttatcgatggtgctatcgaggagggcacccgcgcagcggttactgtaattgaggaactgcgtcctgcgcctgcggtgcgttcccacctg

SEQ ID NO: 436 - protein, 495 aa, synthetic construct
  REGION 1..495: note = Variant of monoamine oxidase
MTSRDGYQWTPETGLTQGVPSLGVISPPTNIEDTDKDGPWDVIVIGGGYCGLTATRDLTVAGFKTLLLEARDRIGGRSWSSNIDGYLYEMGGTWVHWHQSHVWREITRYKMHGALSKSFNFSRGVNHFQLRTNPTTSTYMTHEAEDELLRSALHKFTNVDGTNGRTVLPFPHDMFYVPEFRKYDEMSYSERIDQIRDELSLNERSSLEAFILLCSGGTLENSSFGEFLHWWAMSGYTYQGCMDCLISYKFKDGQSAFARSFWEEAAGTGRLGYVFGCPVRSVVNERDAVRVTARDGREFAAKRLVCTIPLNVLSSVHFSPPLSPQRMAAANIGHVNQSVKVHAEVSCPDMRSWSGISYPFNKLAYAIGDGTTPAGNTHIVCLGGAHNHIQPEEDVEATKMAVENMSPGNMDIKRLVFHNWSKDEFAKGAWFFAPPQLLSKSLDELRCRHGNVLFANSDWALGWRGFIDGAIEEGTRAAVTVIEELRPAPAVRSHL

SEQ ID NO: 437 - DNA, 1485 bp, synthetic construct
  misc_feature 1..1485: note = Variant of monoamine oxidase
  source 1..1485: mol_type = other DNA
atgaccagccgcgacggctatcagtggaccccggaaacgggtctgacccagggcgtaccgtccctgggtgtcatttcgccgccgactaacatcgaagataccgataaggacgggccttgggatgtcattgtcattgggggcgggtattgtgggctgaccgcaacccgtgatttaaccgtcgcagggttcaagacgctgctgctggaggcccgtgatcgtattggtggccgctcctggagcagtaatattgacggttacccgtatgagatgggtggcacttgggttcattggcatcaatctcacgtgtggcgtgaaatcacgcgttataaaatgcacaacgcgctgtctccgtcatttaacttttcacgtggcgtgaatcacttccaactgcgtaccaatccgaccaccagtacgtacatgacgcacgaagcggaggatgaactgctgcgtagcgcattgcataaattcaccaatgtcgacggcactaatggccgtacagtgttgccgttcccacatgatatgttttatgtgccggaatttcgcaagtatgacgaaatgtcatattccgaacgcattgaccagatccgcgacgaactgtctttgaacgaacgctctagtttagaggctttcattttattatgtagcggtggcaccctggaaaactccagctttggtgaatttctgcattggtgggcaatgtcgggttacacgtatcagggctgtatggattgtttaatctcctataaatttaaggatggccagagtgcgttcgcgcgtagcttctgggaagaagccgctggcactggccgtctgggctatgtctttggttgtccggtgcgttctgtggtgaacgaacgcgacgcagtacgtgttaccgcacgtgacggtcgcgaattcgcagcgaaacgtttggtttgcacgattccgctgaacgtattgagttctgttcattttagcccaccactgtccccgcaacgcatggccgctgcgaacattggccatgttaaccagggcgtcaaagtgcatgcggaagtcagttgtccggatatgcgttcatggtcgggtatctcctatccgttcaacaaattagcctacgctatcggcgatggcacgaccccagcgggtaatacgcatattgtgtgccttgggggggcccataatcatatccagccggaagaggacgtggaagcaacgaagatggccgttgaaaacatgtcgcctgggaatatggatatcaaacgtctggtcttccacaactggtgcaaggatgaatttgccaaaggcgcgtggttcttcgcccctccacagctgctgtcaaagagcctggatgaactgcgctgccgtcacggtaatgtcctgtttgcaaactccgattgggccttaggttggcgtggttttatcgatggtgctatcgaggagggcacccgcgcagcggttactgtaattgaggaactgcgtcctgcgcctgcggtgcgttcccacctg

SEQ ID NO: 438 - protein, 495 aa, synthetic construct
  REGION 1..495: note = Variant of monoamine oxidase
MTSRDGYQWTPETGLTQGVPSLGVISPPTNIEDTDKDGPWDVIVIGGGYCGLTATRDLTVAGFKTLLLEARDRIGGRSWSSNIDGYPYEMGGTWVHWHQSHVWREITRYKMHNALSPSFNFSRGVNHFQLRTNPTTSTYMTHEAEDELLRSALHKFTNVDGTNGRTVLPFPHDMFYVPEFRKYDEMSYSERIDQIRDELSLNERSSLEAFILLCSGGTLENSSFGEFLHWWAMSGYTYQGCMDCLISYKFKDGQSAFARSFWEEAAGTGRLGYVFGCPVRSVVNERDAVRVTARDGREFAAKRLVCTIPLNVLSSVHFSPPLSPQRMAAANIGHVNQGVKVHAEVSCPDMRSWSGISYPFNKLAYAIGDGTTPAGNTHIVCLGGAHNHIQPEEDVEATKMAVENMSPGNMDIKRLVFHNWCKDEFAKGAWFFAPPQLLSKSLDELRCRHGNVLFANSDWALGWRGFIDGAIEEGTRAAVTVIEELRPAPAVRSHL

SEQ ID NO: 439 - DNA, 1485 bp, synthetic construct
  misc_feature 1..1485: note = Variant of monoamine oxidase
  source 1..1485: mol_type = other DNA
atgaccagccgcgacggctatcagtggaccccggaaacgggtctgacccagggcgtaccgtccctgggtgtcatttcgccgccgactaacatcgaagataccgataaggacgggccttgggatgtcattgtcattgggggcgggtattgtgggctgaccgcaacccgtgatttaaccgtcgcagggttcaagacgctgctgctggaggcccgtgatcgtattggtggccgctcctggagcagtaacattgacggttacccgtatgagatgggtggcacttgggttcattggcatcaatctcacgtgtggcgtgaaatcacgcgttataatatgcacaacgcgctgtctccgtcatttaacttttcacgtggcgtgaatcacttccaactgcgtaccaatccgaccaccagtacgtacatgacgcacgaagcggaggatgaactgctgcgtagcgcattgcataaattcaccaatgtcgacggcactaatggccgtacagtgttgccgttcccacatgatatgttttatgtgccggaatttcgcaagtatgacgaaatgtcatattccgaacgcattgaccagatccgcgacgaactgtctttgaacgaacgctctagtttagaggctttcattttattatgtagcggtggcaccctggaaaactccagctttggtgaatttctgcattggtgggcaatgtcgggttacacgtatcagggctgtatggattgtttaatctcctataaatttaaggatggccagagtgcgttcgcgcgtcgcttctgggaagaagccgctggcactggccgtctgggctatgtctttggttgtccggtgcgttctgtggtgaacgaacgcgacgcagtacgtgttaccgcacgtgacggtcgcgaattcgcagcgaaacgtttggtttgcacgattccgctgaacgtattgagttctgttcattttagcccaccactgtccccgcaacgcatggccgctgcgaacattggccatgttaaccagggcgtcaaagtgcatgcggaagtcagttgtccggatatgcgttcatggtcgggtatctcctatccgttcaacaaattagcctacgctatcggcgatggcacgaccccagcgggtaatacgcatattgtgtgccttgggggggcccataatcatatccagccggaagaggacgtggaagcaacgaagatggccgttgaaaacatgtcgcctgggaatatggatatcaaacgtctggtcttcgggaactggtgcaaggatgaatttgccaaaggcgcgtggttcttcgcccctccacagctgctgtcaaagagcctggatgaactgcgctgccgtcacggtaatgtcctgtttgcaaactccgattgggccttaggttggcgtggttttatcgatggtgctatcgaggagggcacccgcgcagcggttactgtaattgaggaactgcgtcctgcgcctgcggtgcgttcccacctg

SEQ ID NO: 440 - protein, 495 aa, synthetic construct
  REGION 1..495: note = Variant of monoamine oxidase
MTSRDGYQWTPETGLTQGVPSLGVISPPTNIEDTDKDGPWDVIVIGGGYCGLTATRDLTVAGFKTLLLEARDRIGGRSWSSNIDGYPYEMGGTWVHWHQSHVWREITRYNMHNALSPSFNFSRGVNHFQLRTNPTTSTYMTHEAEDELLRSALHKFTNVDGTNGRTVLPFPHDMFYVPEFRKYDEMSYSERIDQIRDELSLNERSSLEAFILLCSGGTLENSSFGEFLHWWAMSGYTYQGCMDCLISYKFKDGQSAFARRFWEEAAGTGRLGYVFGCPVRSVVNERDAVRVTARDGREFAAKRLVCTIPLNVLSSVHFSPPLSPQRMAAANIGHVNQGVKVHAEVSCPDMRSWSGISYPFNKLAYAIGDGTTPAGNTHIVCLGGAHNHIQPEEDVEATKMAVENMSPGNMDIKRLVFGNWCKDEFAKGAWFFAPPQLLSKSLDELRCRHGNVLFANSDWALGWRGFIDGAIEEGTRAAVTVIEELRPAPAVRSHL

SEQ ID NO: 441 - DNA, 1485 bp, synthetic construct
  misc_feature 1..1485: note = Variant of monoamine oxidase
  source 1..1485: mol_type = other DNA
atgaccagccgcgacggctatcagtggaccccggaaacgggtctgacccagggcgtaccgtccctgggtgtcatttcgccgccgactaacatcgaagataccgataaggacgggccttgggatgtcattgtcattgggggcgggtattgtgggctgaccgcaacccgtgatttaaccgtcgcagggttcaagacgctgctgctggaggcccgtgatcgtattggtggccgctcctggagcagtcgcattgacggttacccgtatgagatgggtggcacttgggttcattggcatcaatctcacgtgtggcgtgaaatcacgcgttataaaatgcacggcgcgctgtctccgtcatttaacttttcacgtggcgtgaatcacttccaactgcgtaccaatccgaccaccagtacgtacatgacgcacgaagcggaggatgaactgctgcgtagcgcattgcataaattcaccaatgtcgacggcactaatggccgtacagtgttgccgttcccacatgatatgttttatgtgccggaatttcgcaagtatgacgaaatgtcatattccgaacgcattgaccagatccgcgacgaactgtctttgaacgaacgctctagtttagaggctttcattttattatgtagcggtggcaccctggaaaactccagctttggtgaatttctgcattggtgggcaatgtcgggttacacgtatcagggctgtatggattgtttaatctcctataaatttaaggatggccagagtgcgttcgcgcgtcgcttctgggaagaagccgctggcactggccgtctgggctatgtctttggttgtccggtgcgttctgtggtgaacgaacgcgacgcagtacgtgttaccgcacgtgacggtcgcgaattcgcagcgaaacgtttggtttgcacgattccgctgaacgtattgagttctgttcattttagcccaccactgtccccgcaacgcatggccgctgcgaacattggccatgttaaccagagcgtcaaagtgcatgcggaagtcagttgtccggatatgcgttcatggtcgggtatctcctatccgttcaacaaattagcctacgctatcggcgatggcacgaccccagcgggtaatacgcatattgtgtgccttgggggggcccataatcatatccagccggaagaggacgtggaagcaacgaagatggccgttgaaaacatgtcgcctgggaatatggatatcaaacgtctggtcttccacaactggtgcaaggatgaatttgccaaaggcgcgtggttcttcgcccctccacagctgctgtcaaagagcctggatgaactgcgctgccgtcacggtaatgtcctgtttgcaaactccgattgggccttaggttggcgtggttttatcgatggtgctatcgaggagggcacccgcgcagcggttactgtaattgaggaactgcgtcctgcgcctgcggtgcgttcccacctg

SEQ ID NO: 442 - protein, 495 aa, synthetic construct
  REGION 1..495: note = Variant of monoamine oxidase
MTSRDGYQWTPETGLTQGVPSLGVISPPTNIEDTDKDGPWDVIVIGGGYCGLTATRDLTVAGFKTLLLEARDRIGGRSWSSRIDGYPYEMGGTWVHWHQSHVWREITRYKMHGALSPSFNFSRGVNHFQLRTNPTTSTYMTHEAEDELLRSALHKFTNVDGTNGRTVLPFPHDMFYVPEFRKYDEMSYSERIDQIRDELSLNERSSLEAFILLCSGGTLENSSFGEFLHWWAMSGYTYQGCMDCLISYKFKDGQSAFARRFWEEAAGTGRLGYVFGCPVRSVVNERDAVRVTARDGREFAAKRLVCTIPLNVLSSVHFSPPLSPQRMAAANIGHVNQSVKVHAEVSCPDMRSWSGISYPFNKLAYAIGDGTTPAGNTHIVCLGGAHNHIQPEEDVEATKMAVENMSPGNMDIKRLVFHNWCKDEFAKGAWFFAPPQLLSKSLDELRCRHGNVLFANSDWALGWRGFIDGAIEEGTRAAVTVIEELRPAPAVRSHL

SEQ ID NO: 443 - DNA, 1485 bp, synthetic construct
  misc_feature 1..1485: note = Variant of monoamine oxidase
  source 1..1485: mol_type = other DNA
atgaccagccgcgacggctatcagtggaccccggaaacgggtctgacccagggcgtaccgtccctgggtgtcatttcgccgccgactaacatcgaagataccgataaggacgggccttgggatgtcattgtcattgggggcgggtattgtgggctgaccgcaacccgtgatttaaccgtcgcagggttcaagacgctgctgctggaggcccgtgatcgtattggtggccgctcctggagcagtaacattgacggttacccgtatgagatgggtggcacttgggttcattggcatcaatctcacgtgtggcgtgaaatcacgcgttataaaatgcacaacgcgctgtctccatcatttaacttttcacgtggcgtgaatcacttccaactgcgtaccaatccgaccaccagtacgtacatgacgcacgaagcggaggatgaactgctgcgtagcgcattgcataaattcaccaatgtcgacggcactaatggccgtacagtgttgccgttcccacatgatatgttttatgtgccggaatttcgcaagtatgacgaaatgtcatattccgaacgcattgaccagatccgcgacgaactgtctttgaacgaacgctctagtttagaggctttcattttattatgtagcggtggcacctcggaaaactccagctttggtgaatttctgcattggtgggcaatgtcgggttacacgtatcagggctgtatggattgtttaatctcctataaatttaaggatggccagagtgcgttcgcgcgtcgcttctgggaagaagccgctggcactggccgtctgggctatgtctttggttgtccggtgcgttctgtggtgaacgaacgcgacgcagtacgtgttaccgcacgtgacggtcgcgaattcgcagcgaaacgtttggtttgcacgattccgctgaacgtattgagttctgttcattttagcccaccactgtccccgcaacgcatggccgctgcgaacattggccatgttaaccagtgcgtcaaagtgcatgcggaagtcagttgtccggatatgcgttcatggtcgggtatctcctatccgttcaacaaattagcctacgctatcggcgatggcacgaccccagcgggtaatacgcatattgtgtgccttgggggggcccataatcatatccagccggaagaggacgtggaagcaacgaagatggccgttgaaaacatgtcgcctgggaatatggatatcaaacgtctggtcttccataactggagcaaggatgaatttgccaaaggcgcgtggttcttcgcccctccacagctgctgtcaaagagcctggatgaactgcgctgccgtcacggtaatgtcctgtttgcaaactccgattgggccttaggttggcgtggttttatcgatggtgctatcgaggagggcacccgcgcagcggttactgtaattgaggaactgcgtcctgcgcctgcggtgcgttcccacctg

SEQ ID NO: 444 - protein, 495 aa, synthetic construct
  REGION 1..495: note = Variant of monoamine oxidase
MTSRDGYQWTPETGLTQGVPSLGVISPPTNIEDTDKDGPWDVIVIGGGYCGLTATRDLTVAGFKTLLLEARDRIGGRSWSSNIDGYPYEMGGTWVHWHQSHVWREITRYKMHNALSPSFNFSRGVNHFQLRTNPTTSTYMTHEAEDELLRSALHKFTNVDGTNGRTVLPFPHDMFYVPEFRKYDEMSYSERIDQIRDELSLNERSSLEAFILLCSGGTSENSSFGEFLHWWAMSGYTYQGCMDCLISYKFKDGQSAFARRFWEEAAGTGRLGYVFGCPVRSVVNERDAVRVTARDGREFAAKRLVCTIPLNVLSSVHFSPPLSPQRMAAANIGHVNQCVKVHAEVSCPDMRSWSGISYPFNKLAYAIGDGTTPAGNTHIVCLGGAHNHIQPEEDVEATKMAVENMSPGNMDIKRLVFHNWSKDEFAKGAWFFAPPQLLSKSLDELRCRHGNVLFANSDWALGWRGFIDGAIEEGTRAAVTVIEELRPAPAVRSHL

SEQ ID NO: 445 - DNA, 1485 bp, synthetic construct
  misc_feature 1..1485: note = Variant of monoamine oxidase
  source 1..1485: mol_type = other DNA
atgaccagccgcgacggctatcagtggaccccggaaacgggtctgacccagggcgtaccgtccctgggtgtcatttcgccgccgactaacatcgaagataccgataaggacgggccttgggatgtcattgtcattgggggcgggtattgtgggctgaccgcaacccgtgatttaaccgtcgcagggttcaagacgctgctgctggaggcccgtgatcgtattggtggccgctcctggagcagttttattgacggttacggttatgagatgggtggcacttgggttcattggcatcaatctcacgtgtggcgtgaaatcacgcgttataaaatgcacggcgcgctgtctaaatcatttaacttttcacgtggcgtgaatcacttccaactgcgtaccaatccgaccaccagtacgtacatgacgcacgaagcggaggatgaactgctgcgtagcgcattgcataaattcaccaatgtcgacggcactaatggccgtacagtgttgccgttcccacatgatatgttttatgtgccggaatttcgcaagtatgacgaaatgtcatattccgaacgcattgaccagatccgcgacgaactgtctttgaacgaacgctctagtttagaggctttcattttattatgtagcggtggcaccctggaaaactccagctttggtgaatttctgcattggtgggcaatgtcgggttacacgtatcagggctgtatggattgtttaatctcctataaatttaaggatggccagagtgcgttcgcgcgtagcttctgggaagaagccgctggcactggccgtctgggctatgtctttggttgtccggtgcgttctgtggtgaacgaacgcgacgcagtacgtgttaccgcacgtgacggtcgcgaattcgcagcgaaacgtttggtttgcacgattccgctgaacgtattgagttctgttcattttagcccaccactgtccccgcaacgcatggccgctgcgaacattggccatgttaaccagggcgtcaaagtgcatgcggaagtcagttgtccggatatgcgttcatggtcgggtatctcctatccgttcaacaaattagcctacgctatcggcgatggcacgaccccagcgggtaatacgcatattgtgtgccttgggggggcccataatcatatccagccggaagaggacgtggaagcaacgaagatggccgttgaaaacatgtcgcctgggaatatggatatcaaacgtctggtcttccacaactggtgcaaggatgaatttgccaaaggcgcgtggttcttcgcccctccacagctgctgtcaaagagcctggatgaactgcgctgccgtcacggtaatgtcctgtttgcaaactccgattgggccttaggttggcgtggttttatcgatggtgctatcgaggagggcacccgcgcagcggttactgtaattgaggaactgcgtcctgcgcctgcggtgcgttcccacctg

SEQ ID NO: 446 - protein, 495 aa, synthetic construct
  REGION 1..495: note = Variant of monoamine oxidase
MTSRDGYQWTPETGLTQGVPSLGVISPPTNIEDTDKDGPWDVIVIGGGYCGLTATRDLTVAGFKTLLLEARDRIGGRSWSSFIDGYGYEMGGTWVHWHQSHVWREITRYKMHGALSKSFNFSRGVNHFQLRTNPTTSTYMTHEAEDELLRSALHKFTNVDGTNGRTVLPFPHDMFYVPEFRKYDEMSYSERIDQIRDELSLNERSSLEAFILLCSGGTLENSSFGEFLHWWAMSGYTYQGCMDCLISYKFKDGQSAFARSFWEEAAGTGRLGYVFGCPVRSVVNERDAVRVTARDGREFAAKRLVCTIPLNVLSSVHFSPPLSPQRMAAANIGHVNQGVKVHAEVSCPDMRSWSGISYPFNKLAYAIGDGTTPAGNTHIVCLGGAHNHIQPEEDVEATKMAVENMSPGNMDIKRLVFHNWCKDEFAKGAWFFAPPQLLSKSLDELRCRHGNVLFANSDWALGWRGFIDGAIEEGTRAAVTVIEELRPAPAVRSHL

SEQ ID NO: 447 - DNA, 1485 bp, synthetic construct
  misc_feature 1..1485: note = Variant of monoamine oxidase
  source 1..1485: mol_type = other DNA
atgaccagccgcgacggctatcagtggaccccggaaacgggtctgacccagggcgtaccgtccctgggtgtcatttcgccgccgactaacatcgaagataccgataaggacgggccttgggatgtcattgtcattgggggcgggtattgtgggctgaccgcaacccgtgatttaaccgtcgcagggttcaagacgctgctgctggaggcccgtgatcgtattggtggccgctcctggcacagtaatattgacggttacccgtatgagatgggtggcacttgggttcattggcatcaatctcacgtgtggcgtgaaatcacgcgttataaaatgcacaacgcgctgtctccatcatttaacttttcacgtggcgtgaatcacttccaactgcgtaccaatccgaccaccagtacgtacatgacgcacgaagcggaggatgaactgctgcgtagcgcattgcataaattcaccaatgtcgacggcactaatggccgtacagtgttgccgttcccacatgatatgttttatgtgccggaatttcgcaagtatgacgaaatgtcatattccgaacgcattgaccagatccgcgacgaactgtctttgaacgaacgctctagtttagaggctttcattttattatgtagcggtggcaccctggaaaactccagctttggtgaatttctgcattggtgggcaatgtcgggttacacgtatcagggctgtatggattgtttaatctcctataaatttaaggatggccagagtgcgttcgcgcgtcgcttctgggaagaagccgctggcactggccgtctgggctatgtctttggttgtccggtgcgttctgtggtgaacgaacgcgacgcagtacgtgttaccgcacgtgacggtcgcgaattcgcagcgaaacgtttggtttgcacgattccgctgaacgtattgagttctgttcattttagcccaccactgtccccgcaacgcatggccgctgcgaacattggccatgttaaccagtgcgtcaaagtgcatgcggaagtcagttgtccggatatgcgttcatggtcgggtatctcctatccgttcaacaaattagcctacgctatcggcgatggcacgaccccagcgggtaatacgcatattgtgtgccttgggggggcccataatcatatccagccggaagaggacgtggaagcaacgaagatggccgttgaaaacatgtcgcctgggaatatggatatcaaacgtctggtcttccacaactggtgcaaggatgaatttgccaaaggcgggtggttcttcgcccctccacagctgctgtcaaagagcctggatgaactgcgctgccgtcacggtaatgtcctgtttgcaaactccgattgggccttaggttggcgtggttttatcgatggtgctatcgaggagggcacccgcgcagcggttactgtaattgaggaactgcgtcctgcgcctgcggtgcgttcccacctg

SEQ ID NO: 448 - protein, 495 aa, synthetic construct
  REGION 1..495: note = Variant of monoamine oxidase
MTSRDGYQWTPETGLTQGVPSLGVISPPTNIEDTDKDGPWDVIVIGGGYCGLTATRDLTVAGFKTLLLEARDRIGGRSWHSNIDGYPYEMGGTWVHWHQSHVWREITRYKMHNALSPSFNFSRGVNHFQLRTNPTTSTYMTHEAEDELLRSALHKFTNVDGTNGRTVLPFPHDMFYVPEFRKYDEMSYSERIDQIRDELSLNERSSLEAFILLCSGGTLENSSFGEFLHWWAMSGYTYQGCMDCLISYKFKDGQSAFARRFWEEAAGTGRLGYVFGCPVRSVVNERDAVRVTARDGREFAAKRLVCTIPLNVLSSVHFSPPLSPQRMAAANIGHVNQCVKVHAEVSCPDMRSWSGISYPFNKLAYAIGDGTTPAGNTHIVCLGGAHNHIQPEEDVEATKMAVENMSPGNMDIKRLVFHNWCKDEFAKGGWFFAPPQLLSKSLDELRCRHGNVLFANSDWALGWRGFIDGAIEEGTRAAVTVIEELRPAPAVRSHL

SEQ ID NO: 449 - DNA, 1485 bp, synthetic construct
  misc_feature 1..1485: note = Variant of monoamine oxidase
  source 1..1485: mol_type = other DNA
atgaccagccgcgacggctatcagtggaccccggaaacgggtctgacccagggcgtaccgtccctgggtgtcatttcgccgccgactaacatcgaagataccgataaggacgggccttgggatgtcattgtcattgggggcgggtattgtgggctgaccgcaacccgtgatttaaccgtcgcagggttcaagacgctgctgctggaggcccgtgatcgtattggtggccgctcctggagcagttttattgacggttacggttatgagatgggtggcacttgggttcattggcatcaatctcacgtgtggcgtgaaatcacgcgttataaaatgcacaacgcgctgtctaaatcatttaacttttcacgtggcgtgaatcacttccaactgcgtaccaatccgaccaccagtacgtacatgacgcacgaagcggaggatgaactgctgcgtagcgcattgcataaattcaccaatgtcgacggcactaatggccgtacagtgttgccgttcccacatgatatgttttatgtgccggaatttcgcaagtatgacgaaatgtcatattccgaacgcattgaccagatccgcgacgaactgtctttgaacgaacgctctagtttagaggctttcattttattatgtagcggtggcaccctggaaaactccagctttggtgaatttctgcattggtgggcaatgtcgggttacacgtatcagggctgtatggattgtttaatctcctataaatttaaggatggccagagtgcgttcgcgcgtcgcttctgggaagaagccgctggcactggccgtctgggctatgtctttggttgtccggtgcgttctgtggtgaacgaacgcgacgcagtacgtgttaccgcacgtgacggtcgcgaattcgcagcgaaacgtttggtttgcacgattccgctgaacgtattgagttctgttcattttagcccaccactgtccccgcaacgcatggccgctgcgaacattggccatgttaaccagtgcgtcaaagtgcatgcggaagtcagttgtccggatatgcgttcatggtcgggtatctcctatccgttcaacaaattagcctacgctatcggcgatggcacgaccccagcgggtaatacgcatattgtgtgccttgggggggcccataatcatatccagccggaagaggacgtggaagcaacgaagatggccgttgaaaacatgtcgcctgggaatatggatatcaaacgtctggtcttccacaactggtgcaaggatgaatttgccaaaggcgcgtggttcttcgcccctccacagctgctgtcaaagagcctggatgaactgcgctgccgtcacggtaatgtcctgtttgcaaactccgattgggccttaggttggcgtggttttatcgatggtgctatcgaggagggcacccgcgcagcggttactgtaattgaggaactgcgtcctgcgcctgcggtgcgttcccacctg

SEQ ID NO: 450 - protein, 495 aa, synthetic construct
  REGION 1..495: note = Variant of monoamine oxidase
MTSRDGYQWTPETGLTQGVPSLGVISPPTNIEDTDKDGPWDVIVIGGGYCGLTATRDLTVAGFKTLLLEARDRIGGRSWSSFIDGYGYEMGGTWVHWHQSHVWREITRYKMHNALSKSFNFSRGVNHFQLRTNPTTSTYMTHEAEDELLRSALHKFTNVDGTNGRTVLPFPHDMFYVPEFRKYDEMSYSERIDQIRDELSLNERSSLEAFILLCSGGTLENSSFGEFLHWWAMSGYTYQGCMDCLISYKFKDGQSAFARRFWEEAAGTGRLGYVFGCPVRSVVNERDAVRVTARDGREFAAKRLVCTIPLNVLSSVHFSPPLSPQRMAAANIGHVNQCVKVHAEVSCPDMRSWSGISYPFNKLAYAIGDGTTPAGNTHIVCLGGAHNHIQPEEDVEATKMAVENMSPGNMDIKRLVFHNWCKDEFAKGAWFFAPPQLLSKSLDELRCRHGNVLFANSDWALGWRGFIDGAIEEGTRAAVTVIEELRPAPAVRSHL

SEQ ID NO: 451 - DNA, 1485 bp, synthetic construct
  misc_feature 1..1485: note = Variant of monoamine oxidase
  source 1..1485: mol_type = other DNA
atgaccagccgcgacggctatcagtggaccccggaaacgggtctgacccagggcgtaccgtccctgggtgtcatttcgccgccgactaacatcgaagataccgataaggacgggccttgggatgtcattgtcattgggggcgggtattgtgggctgaccgcaacccgtgatttaaccgtcgcagggttcaagacgctgctgctggaggcccgtgatcgtattggtggccgctcctggagcagtaatattgacggttacctgtatgagatgggtggcacttgggttcattggcatcaatctcacgtgtggcgtgaaatcacgcgttataaaatgcacaacgcgctgtctaaatcatttaacttttcacgtggcgtgaatcacttccaactgcgtaccaatccgaccaccagtacgtacatgacgcacgaagcggaggatgaactgctgcgtagcgcattgcataaattcaccaatgtcgacggcactaatggccgtacagtgttgccattcccacatgatatgttttatgtgccggaatttcgcaagtatgacgaaatgtcatattccgaacgcattgaccagatccgcgacgaactgtctttgaacgaacgctctagtttagaggctttcattttattatgtagcggtggcggctcggaaaactccagctttggtgaatttctgcattggtgggcaatgtcgggttacacgtatcagggctgtatggattgtttaatctcctataaatttaaggatggccagagtgcgttcgcgcgtcgcttctgggaagaagccgctggcactggccgtctgggctatgtctttggttgtccggtgcgttctgtggtgaacgaacgcgacgcagtacgtgttaccgcacgtgacggtcgcgaattcgcagcgaaacgtttggtttgcacgattccgctgaacgtattgagttctgttcattttagcccaccactgtccccgcaacgcatggccgctgcgaacattggccatgttaaccagtgcgtcaaagtgcatgcggaagtcagttgtccggatatgcgttcatggtcgggtatctcctatccgttcaacaaattagcctacgctatcggcgatggcacgaccccagcgggtaatacgcatattgtgtgccttgggggggcccataatcatatccagccggaagaggacgtggaagcaacgaagatggccgttgaaaacatgtcgcctgggaatatggatatcaaacgtctggtcttccacaactggtgcaaggatgaatttgccaaaggcgcgtggttcttcgcccctccacagctgctgtcaaagagcctggatgaactgcgctgccgtcacggtaatgtcctgtttgcaaactccgattgggccttaggttggcgtggttttatcgatggtgctatcgaggagggcacccgcgcagcggttactgtaattgaggaactgcgtcctgcgcctgcggtgcgttcccacctg

SEQ ID NO: 452 - protein, 495 aa, synthetic construct
  REGION 1..495: note = Variant of monoamine oxidase
MTSRDGYQWTPETGLTQGVPSLGVISPPTNIEDTDKDGPWDVIVIGGGYCGLTATRDLTVAGFKTLLLEARDRIGGRSWSSNIDGYLYEMGGTWVHWHQSHVWREITRYKMHNALSKSFNFSRGVNHFQLRTNPTTSTYMTHEAEDELLRSALHKFTNVDGTNGRTVLPFPHDMFYVPEFRKYDEMSYSERIDQIRDELSLNERSSLEAFILLCSGGGSENSSFGEFLHWWAMSGYTYQGCMDCLISYKFKDGQSAFARRFWEEAAGTGRLGYVFGCPVRSVVNERDAVRVTARDGREFAAKRLVCTIPLNVLSSVHFSPPLSPQRMAAANIGHVNQCVKVHAEVSCPDMRSWSGISYPFNKLAYAIGDGTTPAGNTHIVCLGGAHNHIQPEEDVEATKMAVENMSPGNMDIKRLVFHNWCKDEFAKGAWFFAPPQLLSKSLDELRCRHGNVLFANSDWALGWRGFIDGAIEEGTRAAVTVIEELRPAPAVRSHL

SEQ ID NO: 453 - DNA, 1485 bp, synthetic construct
  misc_feature 1..1485: note = Variant of monoamine oxidase
  source 1..1485: mol_type = other DNA
atgaccagccgcgacggctatcagtggaccccggaaacgggtctgacccagggcgtaccgtccctgggtgtcatttcgccgccgactaacatcgaagataccgataaggacgggccttgggatgtcattgtcattgggggcgggtattgtgggctgaccgcaacccgtgatttaaccgtcgcagggttcaagacgctgctgctggaggcccgtgatcgtattggtggccgctccgacagcagtaatattgacggttacccgtatgagatgggtggcacttgggttcattggcatcaatctcacgtgtggcgtgaaatcacgcgttataaaatgcacaacgcgctgtctccatcatttaacttttcacgtggcgtgaatcacttccaactgcgtaccaatccgaccaccagtacgtacatgacgcacgaagcggaggatgaactgctgcgtagcgcattgcataaattcaccaatgtcgacggcactaatggccgtacagtgttgccgttcccacatgatatgttttatgtgccggaatttcgcaagtttgatgaaatgtcatattccgaacgcattgaccagatccgcgacgaactgtctttgaacgaacgctctagtttagaggctttcattttattatgtagcggtggcaccctggaaaactccagctttggtgaatttctgcattggtgggcaatgtcgggttacacgtaccagggctgtatggattgtttaatctcctataaatttaaggatggccagagtgcgttcgcgcgtcgcttctgggaagaagccgctggcactggccgtctgggctatgtctttggttgtccggtgcgttctgtggtggatgaacgcgacgcagtacgtgttaccgcacgtgacggtcgcgaattcgcagcgaaacgtttggtttgcacgattccgctgaacgtattgagttctgttcattttagcccaccactgtccccgcaacgcatggccgctgcgaacggcggccatgttaaccagtgcgtcaaagtgcatgcggaagtcagttgtccggatatgcgttcatggtcgggtatctcctatccgttcaacaaattagcctacgctatcggcgatggcacgaccccagcgggtaatacgcatattgtgtgccttgggggggcccataatcatatccagccggaagaggacgtggaagcaacgaagatggccgttgaaaacatgtcgcctgggaatatggatatcaaacgtctggtcttccacaactggtgcaaggatgaatttgccaaaggcgcgtggttcttcgcccctccacagctgctgtcaaagagcctggatgaactgcgctgccgtcacggtaatgtcctgtttgcaaactccgattgggccttaggttggcgtggttttatcgatggtgctatcgaggagggcacccgcgcagcggttactgtaattgaggaactgcgtcctgcgcctgcggtgcgttcccacctg

SEQ ID NO: 454 - protein, 495 aa, synthetic construct
  REGION 1..495: note = Variant of monoamine oxidase
MTSRDGYQWTPETGLTQGVPSLGVISPPTNIEDTDKDGPWDVIVIGGGYCGLTATRDLTVAGFKTLLLEARDRIGGRSDSSNIDGYPYEMGGTWVHWHQSHVWREITRYKMHNALSPSFNFSRGVNHFQLRTNPTTSTYMTHEAEDELLRSALHKFTNVDGTNGRTVLPFPHDMFYVPEFRKFDEMSYSERIDQIRDELSLNERSSLEAFILLCSGGTLENSSFGEFLHWWAMSGYTYQGCMDCLISYKFKDGQSAFARRFWEEAAGTGRLGYVFGCPVRSVVDERDAVRVTARDGREFAAKRLVCTIPLNVLSSVHFSPPLSPQRMAAANGGHVNQCVKVHAEVSCPDMRSWSGISYPFNKLAYAIGDGTTPAGNTHIVCLGGAHNHIQPEEDVEATKMAVENMSPGNMDIKRLVFHNWCKDEFAKGAWFFAPPQLLSKSLDELRCRHGNVLFANSDWALGWRGFIDGAIEEGTRAAVTVIEELRPAPAVRSHL

SEQ ID NO: 455 - DNA, 1485 bp, synthetic construct
  misc_feature 1..1485: note = Variant of monoamine oxidase
  source 1..1485: mol_type = other DNA
atgaccagccgcgacggctatcagtggaccccggaaacgggtctgacccagggcgtaccgtccctgggtgtcatttcgccgccgactaacatcgaagataccgataaggacgggccttgggatgtcattgtcattgggggcgggtattgtgggctgaccgcaacccgtgatttaaccgtcgcagggttcaagacgctgctgctggaggcccgtgatcgtattggtggccgctcctggagcagtcgcattgacggttacggttatgagatgggtggcacttgggttcattggcatcaatctcacgtgtggcgtgaaatcacgcgttataaaatgcacggcgcgctgtctccgtcatttaacttttcacgtggcgtgaatcacttccaactgcgtaccaatccgaccaccagtacgtacatgacgcacgaagcggaggatgaactgctgcgtagcgcattgcataaattcaccaatgtcgacggcactaatggccgtacagtgttgccgttcccacatgatatgttttatgtgccggaatttcgcaagtatgacgaaatgtcatattccgaacgcattgaccagatccgcgacgaactgtctttgaacgaacgctctagtttagaggctttcattttattatgtagcggtggcaccctggaaaactccagctttggtgaatttctgcattggtgggcaatgtcgggttacacgtatcagggctgtatggattgtttaatctcctataaatttaaggatggccagagtgcgttcgcgcgtcgcttctgggaagaagccgctggcactggccgtctgggctatgtctttggttgtccggtgcgttctgtggtgaacgaacgcgacgcagtacgtgttaccgcacgtgacggtcgcgaattcgcagcgaaacgtttggtttgcacgattccgctgaacgtattgagttctgttcattttagcccaccactgtccccgcaacgcatggccgctgcgaacattggccatgttaaccagtgcgtcaaagtgcatgcggaagtcagttgtccggatatgcgttcatggtcgggtatctcctatccgttcaacaaattagcctacgctatcggcgatggcacgaccccagcgggtaatacgcatattgtgtgccttgggggggcccataatcatatccagccggaagaggacgtggaagcaacgaagatggccgttgaaaacatgtcgcctgggaatatggatatcaaacgtctggtcttccataactggagcaaggatgaatttgccaaaggcgcgtggttcttcgcccctccacagctgctgtcaaagagcctggatgaactgcgctgccgtcacggtaatgtcctgtttgcaaactccgattgggccttaggttggcgtggttttatcgatggtgctatcgaggagggcacccgcgcagcggttactgtaattgaggaactgcgtcctgcgcctgcggtgcgttcccacctg

SEQ ID NO: 456 - protein, 495 aa, synthetic construct
  REGION 1..495: note = Variant of monoamine oxidase
MTSRDGYQWTPETGLTQGVPSLGVISPPTNIEDTDKDGPWDVIVIGGGYCGLTATRDLTVAGFKTLLLEARDRIGGRSWSSRIDGYGYEMGGTWVHWHQSHVWREITRYKMHGALSPSFNFSRGVNHFQLRTNPTTSTYMTHEAEDELLRSALHKFTNVDGTNGRTVLPFPHDMFYVPEFRKYDEMSYSERIDQIRDELSLNERSSLEAFILLCSGGTLENSSFGEFLHWWAMSGYTYQGCMDCLISYKFKDGQSAFARRFWEEAAGTGRLGYVFGCPVRSVVNERDAVRVTARDGREFAAKRLVCTIPLNVLSSVHFSPPLSPQRMAAANIGHVNQCVKVHAEVSCPDMRSWSGISYPFNKLAYAIGDGTTPAGNTHIVCLGGAHNHIQPEEDVEATKMAVENMSPGNMDIKRLVFHNWSKDEFAKGAWFFAPPQLLSKSLDELRCRHGNVLFANSDWALGWRGFIDGAIEEGTRAAVTVIEELRPAPAVRSHL

SEQ ID NO: 457 - DNA, 1485 bp, synthetic construct
  misc_feature 1..1485: note = Variant of monoamine oxidase
  source 1..1485: mol_type = other DNA
atgaccagccgcgacggctatcagtggaccccggaaacgggtctgacccagggcgtaccgtccctgggtgtcatttcgccgccgactaacatcgaagataccgataaggacgggccttgggatgtcattgtcattgggggcgggtattgtgggctgaccgcaacccgtgatttaaccgtcgcagggttcaagacgctgctgctggaggcccgtgatcgtattggtggccgctcctggagcagttttattgacggttacctgtatgagatgggtggcacttgggttcattggcatcaatctcacgtgtggcgtgaaatcacgcgttataaaatgcacaacgcgctgtctccgtcatttaacttttcacgtggcgtgaatcacttccaactgcgtaccaatccgaccaccagtacgtacatgacgcacgaagcggaggatgaactgctgcgtagcgcattgcataaattcaccaatgtcgacggcactaatggccgtacagtgttgccgttcccacatgatatgttttatgtgccggaatttcgcaagtatgacgaaatgtcatattccgaacgcattgaccagatccgcgacgaactgtctttgaacgaacgctctagtttagaggctttcattttattatgtagcggtggcaccctggaaaactccagctttggtgaatttctgcattggtgggcaatgtcgggttacacgtatcagggctgtatggattgtttaatctcctataaatttaaggatggccagagtgcgttcgcgcgtcgcttctgggaagaagccgctggcactggccgtctgggctatgtctttggttgtccggtgcgttctgtggtgaacgaacgcgacgcagtacgtgttaccgcacgtgacggtcgcgaattcgcagcgaaacgtttggtttgcacgattccgctgaacgtattgagttctgttcattttagcccaccactgtccccgcaacgcatggccgctgcgaacattggccatgttaaccagagcgtcaaagtgcatgcggaagtcagttgtccggatatgcgttcatggtcgggtatctcctatccgttcaacaaattagcctacgctatcggcgatggcacgaccccagcgggtaatacgcatattgtgtgccttgggggggcccataatcatatccagccggaagaggacgtggaagcaacgaagatggccgttgaaaacatgtcgcctgggaatatggatatcaaacgtctggtcttccataactggtgcaaggatgaatttgccaaaggcgcgtggttcttcgcccctccacagctgctgtcaaagagcctggatgaactgcgctgccgtcacggtaatgtcctgtttgcaaactccgattgggccttaggttggcgtggttttatcgatggtgctatcgaggagggcacccgcgcagcggttactgtaattgaggaactgcgtcctgcgcctgcggtgcgttcccacctg

SEQ ID NO: 458 - protein, 495 aa, synthetic construct
  REGION 1..495: note = Variant of monoamine oxidase
MTSRDGYQWTPETGLTQGVPSLGVISPPTNIEDTDKDGPWDVIVIGGGYCGLTATRDLTVAGFKTLLLEARDRIGGRSWSSFIDGYLYEMGGTWVHWHQSHVWREITRYKMHNALSPSFNFSRGVNHFQLRTNPTTSTYMTHEAEDELLRSALHKFTNVDGTNGRTVLPFPHDMFYVPEFRKYDEMSYSERIDQIRDELSLNERSSLEAFILLCSGGTLENSSFGEFLHWWAMSGYTYQGCMDCLISYKFKDGQSAFARRFWEEAAGTGRLGYVFGCPVRSVVNERDAVRVTARDGREFAAKRLVCTIPLNVLSSVHFSPPLSPQRMAAANIGHVNQSVKVHAEVSCPDMRSWSGISYPFNKLAYAIGDGTTPAGNTHIVCLGGAHNHIQPEEDVEATKMAVENMSPGNMDIKRLVFHNWCKDEFAKGAWFFAPPQLLSKSLDELRCRHGNVLFANSDWALGWRGFIDGAIEEGTRAAVTVIEELRPAPAVRSHL

SEQ ID NO: 459 - DNA, 1485 bp, synthetic construct
  misc_feature 1..1485: note = Variant of monoamine oxidase
  source 1..1485: mol_type = other DNA
atgaccagccgcgacggctatcagtggaccccggaaacgggtctgacccagggcgtaccgtccctgggtgtcatttcgccgccgactaacatcgaagataccgataaggacgggccttgggatgtcattgtcattgggggcgggtattgtgggctgaccgcaacccgtgatttaaccgtcgcagggttcaagacgctgctgctggaggcccgtgatcgtattggtggccgctcctggagcagtaatattgacggttacccgtatgagatgggtggcacttgggttcattggcatcaatctcacgtgtggcgtgaaatcacgcgttataaaatgcacaacgcgctgtctaaatcatttaacttttcacgtggcgtgaatcacttccaactgcgtaccaatccgaccaccagtacgtacatgacgcacgaagcggaggatgaactgctgcgtagcgcattgcataaattcaccaatgtcgacggcactaatggccgtacagtgttgccgttcccacatgatatgttttatgtgccggaatttcgcaagtatgacgaaatgtcatattccgaacgcattgaccagatccgcgacgaactgtctttgaacgaacgctctagtttagaggctttcattttattatgtagcggtggcacctcggaaaactccagctttggtgaatttctgcattggtgggcaatgtcgggttacacgtatcagggctgtatggattgtttaatctcctataaatttaaggatggccagagtgcgttcgcgcgtcgcttctgggaagaagccgctggcactggccgtctgggctatgtctttggttgtccggtgcgttctgtggtgaacgaacgcgacgcagtacgtgttaccgcacgtgacggtcgcgaattcgcagcgaaacgtttggtttgcacgattccgctgaacgtattgagttctgttcattttagcccaccactgtccccgcaacgcatggccgctgcgaacattggccatgttaaccagtgcgtcaaagtgcatgcggaagtcagttgtccggatatgcgttcatggtcgggtatctcctatccgttcaacaaattagcctacgctatcggcgatggcacgaccccagcgggtaatacgcatattgtgtgccttgggggggcccataatcatatccagccggaagaggacgtggaagcaacgaagatggccgttgaaaacatgtcgcctgggaatatggatatcaaacgtctggtcttccacaactggtgcaaggatgaatttgccaaaggcgcgtggttcttcgcccctccacagctgctgtcaaagagcctggatgaactgcgctgccgtcacggtaatgtcctgtttgcaaactccgattgggccttaggttggcgtggttttatcgatggtgctatcgaggagggcacccgcgcagcggttactgtaattgaggaactgcgtcctgcgcctgcggtgcgttcccacctg

SEQ ID NO: 460 - protein, 495 aa, synthetic construct
  REGION 1..495: note = Variant of monoamine oxidase
MTSRDGYQWTPETGLTQGVPSLGVISPPTNIEDTDKDGPWDVIVIGGGYCGLTATRDLTVAGFKTLLLEARDRIGGRSWSSNIDGYPYEMGGTWVHWHQSHVWREITRYKMHNALSKSFNFSRGVNHFQLRTNPTTSTYMTHEAEDELLRSALHKFTNVDGTNGRTVLPFPHDMFYVPEFRKYDEMSYSERIDQIRDELSLNERSSLEAFILLCSGGTSENSSFGEFLHWWAMSGYTYQGCMDCLISYKFKDGQSAFARRFWEEAAGTGRLGYVFGCPVRSVVNERDAVRVTARDGREFAAKRLVCTIPLNVLSSVHFSPPLSPQRMAAANIGHVNQCVKVHAEVSCPDMRSWSGISYPFNKLAYAIGDGTTPAGNTHIVCLGGAHNHIQPEEDVEATKMAVENMSPGNMDIKRLVFHNWCKDEFAKGAWFFAPPQLLSKSLDELRCRHGNVLFANSDWALGWRGFIDGAIEEGTRAAVTVIEELRPAPAVRSHL

SEQ ID NO: 461 - DNA, 1485 bp, synthetic construct
  misc_feature 1..1485: note = Variant of monoamine oxidase
  source 1..1485: mol_type = other DNA
atgaccagccgcgacggctatcagtggaccccggaaacgggtctgacccagggcgtaccgtccctgggtgtcatttcgccgccgactaacatcgaagataccgataaggacgggccttgggatgtcattgtcattgggggcgggtattgtgggctgaccgcaacccgtgatttaaccgtcgcagggttcaagacgctgctgctggaggcccgtgatcgtattggtggccgctcctggagcagttttattgacggttacggttatgagatgggtggcacttgggttcattggcatcaatctcacgtgtggcgtgaaatcacgcgttataaaatgcacaacgcgctgtctccgtcatttaacttttcacgtggcgtgaatcacttccaactgcgtaccaatccgaccaccagtacgtacatgacgcacgaagcggaggatgaactgctgcgtagcgcattgcataaattcaccaatgtcgacggcactaatggccgtacagtgttgccgttcccacatgatatgttttatgtgccggaatttcgcaagtatgacgaaatgtcatattccgaacgcattgaccagatccgcgacgaactgtctttgaacgaacgctctagtttagaggctttcattttattatgtagcggtggcaccctggaaaactccagctttggtgaatttctgcattggtgggcaatgtcgggttacacgtatcagggctgtatggattgtttaatctcctataaatttaaggatggccagagtgcgttcgcgcgtcgcttctgggaagaagccgctggcactggccgtctgggctatgtctttggttgtccggtgcgttctgtggtgaacgaacgcgacgcagtacgtgttaccgcacgtgacggtcgcgaattcgcagcgaaacgtttggtttgcacgattccgctgaacgtattgagttctgttcattttagcccaccactgtccccgcaacgcatggccgctgcgaacattggccatgttaaccagagcgtcaaagtgcatgcggaagtcagttgtccggatatgcgttcatggtcgggtatctcctatccgttcaacaaattagcctacgctatcggcgatggcacgaccccagcgggtaatacgcatattgtgtgccttgggggggcccataatcatatccagccggaagaggacgtggaagcaacgaagatggccgttgaaaacatgtcgcctgggaatatggatatcaaacgtctggtcttcgggaactggtgcaaggatgaatttgccaaaggcgcgtggttcttcgcccctccacagctgctgtcaaagagcctggatgaactgcgctgccgtcacggtaatgtcctgtttgcaaactccgattgggccttaggttggcgtggttttatcgatggtgctatcgaggagggcacccgcgcagcggttactgtaattgaggaactgcgtcctgcgcctgcggtgcgttcccacctg

SEQ ID NO: 462 - protein, 495 aa, synthetic construct
  REGION 1..495: note = Variant of monoamine oxidase
MTSRDGYQWTPETGLTQGVPSLGVISPPTNIEDTDKDGPWDVIVIGGGYCGLTATRDLTVAGFKTLLLEARDRIGGRSWSSFIDGYGYEMGGTWVHWHQSHVWREITRYKMHNALSPSFNFSRGVNHFQLRTNPTTSTYMTHEAEDELLRSALHKFTNVDGTNGRTVLPFPHDMFYVPEFRKYDEMSYSERIDQIRDELSLNERSSLEAFILLCSGGTLENSSFGEFLHWWAMSGYTYQGCMDCLISYKFKDGQSAFARRFWEEAAGTGRLGYVFGCPVRSVVNERDAVRVTARDGREFAAKRLVCTIPLNVLSSVHFSPPLSPQRMAAANIGHVNQSVKVHAEVSCPDMRSWSGISYPFNKLAYAIGDGTTPAGNTHIVCLGGAHNHIQPEEDVEATKMAVENMSPGNMDIKRLVFGNWCKDEFAKGAWFFAPPQLLSKSLDELRCRHGNVLFANSDWALGWRGFIDGAIEEGTRAAVTVIEELRPAPAVRSHL

SEQ ID NO: 463 - DNA, 1485 bp, synthetic construct
  misc_feature 1..1485: note = Variant of monoamine oxidase
  source 1..1485: mol_type = other DNA
atgaccagccgcgacggctatcagtggaccccggaaacgggtctgacccagggcgtaccgtccctgggtgtcatttcgccgccgactaacatcgaagataccgataaggacgggccttgggatgtcattgtcattgggggcgggtattgtgggctgaccgcaacccgtgatttaaccgtcgcagggttcaagacgctgctgctggaggcccgtgatcgtattggtggccgctcctggagcagtaacattgacggttacggttatgagatgggtggcacttgggttcattggcatcaatctcacgtgtggcgtgaaatcacgcgttataaaatgcacggcgcgctgtctccgtcatttaacttttcacgtggcgtgaatcacttccaactgcgtaccaatccgaccaccagtacgtacatgacgcacgaagcggaggatgaactgctgcgtagcgcattgcataaattcaccaatgtcgacggcactaatggccgtacagtgttgccgttcccacatgatatgttttatgtgccggaatttcgcaagtatgacgaaatgtcatattccgaacgcattgaccagatccgcgacgaactgtctttgaacgaacgctctagtttagaggctttcattttattatgtagcggtggcaccctggaaaactccagctttggtgaatttctgcattggtgggcaatgtcgggttacacgtatcagggctgtatggattgtttaatctcctataaatttaaggatggccagagtgcgttcgcgcgtcgcttctgggaagaagccgctggcactggccgtctgggctatgtctttggttgtccggtgcgttctgtggtgaacgaacgcgacgcagtacgtgttaccgcacgtgacggtcgcgaattcgcagcgaaacgtttggtttgcacgattccgctgaacgtattgagttctgttcattttagcccaccactgtccccgcaacgcatggccgctgcgaacattggccatgttaaccagtgcgtcaaagtgcatgcggaagtcagttgtccggatatgcgttcatggtcgggtatctcctatccgttcaacaaattagcctacgctatcggcgatggcacgaccccagcgggtaatacgcatattgtgtgccttgggggggcccataatcatatccagccggaagaggacgtggaagcaacgaagatggccgttgaaaacatgtcgcctgggaatatggatatcaaacgtctggtcttccacaactggtgcaaggatgaatttgccaaaggcgcgtggttcttcgcccctccacagctgctgtcaaagagcctggatgaactgcgctgccgtcacggtaatgtcctgtttgcaaactccgattgggccttaggttggcgtggttttatcgatggtgctatcgaggagggcacccgcgcagcggttactgtaattgaggaactgcgtcctgcgcctgcggtgcgttcccacctg

SEQ ID NO: 464 - protein, 495 aa, synthetic construct
  REGION 1..495: note = Variant of monoamine oxidase
MTSRDGYQWTPETGLTQGVPSLGVISPPTNIEDTDKDGPWDVIVIGGGYCGLTATRDLTVAGFKTLLLEARDRIGGRSWSSNIDGYGYEMGGTWVHWHQSHVWREITRYKMHGALSPSFNFSRGVNHFQLRTNPTTSTYMTHEAEDELLRSALHKFTNVDGTNGRTVLPFPHDMFYVPEFRKYDEMSYSERIDQIRDELSLNERSSLEAFILLCSGGTLENSSFGEFLHWWAMSGYTYQGCMDCLISYKFKDGQSAFARRFWEEAAGTGRLGYVFGCPVRSVVNERDAVRVTARDGREFAAKRLVCTIPLNVLSSVHFSPPLSPQRMAAANIGHVNQCVKVHAEVSCPDMRSWSGISYPFNKLAYAIGDGTTPAGNTHIVCLGGAHNHIQPEEDVEATKMAVENMSPGNMDIKRLVFHNWCKDEFAKGAWFFAPPQLLSKSLDELRCRHGNVLFANSDWALGWRGFIDGAIEEGTRAAVTVIEELRPAPAVRSHL

SEQ ID NO: 465 - DNA, 1485 bp, synthetic construct
  misc_feature 1..1485: note = Variant of monoamine oxidase
  source 1..1485: mol_type = other DNA
atgaccagccgcgacggctatcagtggaccccggaaacgggtctgacccagggcgtaccgtccctgggtgtcatttcgccgccgactaacatcgaagataccgataaggacgggccttgggatgtcattgtcattgggggcgggtattgtgggctgaccgcaacccgtgatttaaccgtcgcagggttcaagacgctgctgctggaggcccgtgatcgtattggtggccgctcctggagcagtcgcattgacggttacggttatgagatgggtggcacttgggttcattggcatcaatctcacgtgtggcgtgaaatcacgcgttataaaatgcacaacgcgctgtctaaatcatttaacttttcacgtggcgtgaatcacttccaactgcgtaccaatccgaccaccagtacgtacatgacgcacgaagcggaggatgaactgctgcgtagcgcattgcataaattcaccaatgtcgacggcactaatggccgtacagtgttgccgttcccacatgatatgttttatgtgccggaatttcgcaagtatgacgaaatgtcatattccgaacgcattgaccagatccgcgacgaactgtctttgaacgaacgctctagtttagaggctttcattttattatgtagcggtggcaccctggaaaactccagctttggtgaatttctgcattggtgggcaatgtcgggttacacgtatcagggctgtatggattgtttaatctcctataaatttaaggatggccagagtgcgttcgcgcgtagcttctgggaagaagccgctggcactggccgtctgggctatgtctttggttgtccggtgcgttctgtggtgaacgaacgcgacgcagtacgtgttaccgcacgtgacggtcgcgaattcgcagcgaaacgtttggtttgcacgattccgctgaacgtattgagttctgttcattttagcccaccactgtccccgcaacgcatggccgctgcgaacattggccatgttaaccagagcgtcaaagtgcatgcggaagtcagttgtccggatatgcgttcatggtcgggtatctcctatccgttcaacaaattagcctacgctatcggcgatggcacgaccccagcgggtaatacgcatattgtgtgccttgggggggcccataatcatatccagccggaagaggacgtggaagcaacgaagatggccgttgaaaacatgtcgcctgggaatatggatatcaaacgtctggtcttccataactggagcaaggatgaatttgccaaaggcgcgtggttcttcgcccctccacagctgctgtcaaagagcctggatgaactgcgctgccgtcacggtaatgtcctgtttgcaaactccgattgggccttaggttggcgtggttttatcgatggtgctatcgaggagggcacccgcgcagcggttactgtaattgaggaactgcgtcctgcgcctgcggtgcgttcccacctg

SEQ ID NO: 466 - protein, 495 aa, synthetic construct
  REGION 1..495: note = Variant of monoamine oxidase
MTSRDGYQWTPETGLTQGVPSLGVISPPTNIEDTDKDGPWDVIVIGGGYCGLTATRDLTVAGFKTLLLEARDRIGGRSWSSRIDGYGYEMGGTWVHWHQSHVWREITRYKMHNALSKSFNFSRGVNHFQLRTNPTTSTYMTHEAEDELLRSALHKFTNVDGTNGRTVLPFPHDMFYVPEFRKYDEMSYSERIDQIRDELSLNERSSLEAFILLCSGGTLENSSFGEFLHWWAMSGYTYQGCMDCLISYKFKDGQSAFARSFWEEAAGTGRLGYVFGCPVRSVVNERDAVRVTARDGREFAAKRLVCTIPLNVLSSVHFSPPLSPQRMAAANIGHVNQSVKVHAEVSCPDMRSWSGISYPFNKLAYAIGDGTTPAGNTHIVCLGGAHNHIQPEEDVEATKMAVENMSPGNMDIKRLVFHNWSKDEFAKGAWFFAPPQLLSKSLDELRCRHGNVLFANSDWALGWRGFIDGAIEEGTRAAVTVIEELRPAPAVRSHL

SEQ ID NO: 467 - DNA, 1485 bp, synthetic construct
  misc_feature 1..1485: note = Variant of monoamine oxidase
  source 1..1485: mol_type = other DNA
atgaccagccgcgacggctatcagtggaccccggaaacgggtctgacccagggcgtaccgtccctgggtgtcatttcgccgccgactaacatcgaagataccgataaggacgggccttgggatgtcattgtcattgggggcgggtattgtgggctgaccgcaacccgtgatttaaccgtcgcagggttcaagacgctgctgctggaggcccgtgatcgtattggtggccgctcctggagcagtaacattgacggttacctgtatgagatgggtggcacttgggttcattggcatcaatctcacgtgtggcgtgaaatcacgcgttataaaatgcacggcgcgctgtctccgtcatttaacttttcacgtggcgtgaatcacttccaactgcgtaccaatccgaccaccagtacgtacatgacgcacgaagcggaggatgaactgctgcgtagcgcattgcataaattcaccaatgtcgacggcactaatggccgtacagtgttgccgttcccacatgatatgttttatgtgccggaatttcgcaagtatgacgaaatgtcatattccgaacgcattgaccagatccgcgacgaactgtctttgaacgaacgctctagtttagaggctttcattttattatgtagcggtggcacctcggaaaactccagctttggtgaatttctgcattggtgggcaatgtcgggttacacgtatcagggctgtatggattgtttaatctcctataaatttaaggatggccagagtgcgttcgcgcgtcgcttctgggaagaagccgctggcactggccgtctgggctatgtctttggttgtccggtgcgttctgtggtgaacgaacgcgacgcagtacgtgttaccgcacgtgacggtcgcgaattcgcagcgaaacgtttggtttgcacgattccgctgaacgtattgagttctgttcattttagcccaccactgtccccgcaacgcatggccgctgcgaacattggccatgttaaccagtgcgtcaaagtgcatgcggaagtcagttgtccggatatgcgttcatggtcgggtatctcctatccgttcaacaaattagcctacgctatcggcgatggcacgaccccagcgggtaatacgcatattgtgtgccttgggggggcccataatcatatccagccggaagaggacgtggaagcaacgaagatggccgttgaaaacatgtcgcctgggaatatggatatcaaacgtctggtcttccataactggagcaaggatgaatttgccaaaggcgcgtggttcttcgcccctccacagctgctgtcaaagagcctggatgaactgcgctgccgtcacggtaatgtcctgtttgcaaactccgattgggccttaggttggcgtggttttatcgatggtgctatcgaggagggcacccgcgcagcggttactgtaattgaggaactgcgtcctgcgcctgcggtgcgttcccacctg

SEQ ID NO: 468 - protein, 495 aa, synthetic construct
  REGION 1..495: note = Variant of monoamine oxidase
MTSRDGYQWTPETGLTQGVPSLGVISPPTNIEDTDKDGPWDVIVIGGGYCGLTATRDLTVAGFKTLLLEARDRIGGRSWSSNIDGYLYEMGGTWVHWHQSHVWREITRYKMHGALSPSFNFSRGVNHFQLRTNPTTSTYMTHEAEDELLRSALHKFTNVDGTNGRTVLPFPHDMFYVPEFRKYDEMSYSERIDQIRDELSLNERSSLEAFILLCSGGTSENSSFGEFLHWWAMSGYTYQGCMDCLISYKFKDGQSAFARRFWEEAAGTGRLGYVFGCPVRSVVNERDAVRVTARDGREFAAKRLVCTIPLNVLSSVHFSPPLSPQRMAAANIGHVNQCVKVHAEVSCPDMRSWSGISYPFNKLAYAIGDGTTPAGNTHIVCLGGAHNHIQPEEDVEATKMAVENMSPGNMDIKRLVFHNWSKDEFAKGAWFFAPPQLLSKSLDELRCRHGNVLFANSDWALGWRGFIDGAIEEGTRAAVTVIEELRPAPAVRSHL

SEQ ID NO: 469 - DNA, 1485 bp, synthetic construct
  misc_feature 1..1485: note = Variant of monoamine oxidase
  source 1..1485: mol_type = other DNA
atgaccagccgcgacggctatcagtggaccccggaaacgggtctgacccagggcgtaccgtccctgggtgtcatttcgccgccgactaacatcgaagataccgataaggacgggccttgggatgtcattgtcattgggggcgggtattgtgggctgaccgcaacccgtgatttaaccgtcgcagggttcaagacgctgctgctggaggcccgtgatcgtattggtggccgctcctggagcagtaacattgacggttacctgtatgagatgggtggcacttgggttcattggcatcaatctcacgtgtggcgtgaaatcacgcgttataaaatgcacaacgcgctgtctccatcatttaacttttcacgtggcgtgaatcacttccaactgcgtaccaatccgaccaccagtacgtacatgacgcacgaagcggaggatgaactgctgcgtagcgcattgcataaattcaccaatgtcgacggcactaatggccgtacagtgttgccgttcccacatgatatgttttatgtgccggaatttcgcaagtatgacgaaatgtcatattccgaacgcattgaccagatccgcgacgaactgtctttgaacgaacgctctagtttagaggctttcattttattatgtagcggtggcaccctggaaaactccagctttggtgaatttctgcattggtgggcaatgtcgggttacacgtatcagggctgtatggattgtttaatctcctataaatttaaggatggccagagtgcgttcgcgcgtcgcttctgggaagaagccgctggcactggccgtctgggctatgtctttggttgtccggtgcgttctgtggtgaacgaacgcgacgcagtacgtgttaccgcacgtgacggtcgcgaattcgcagcgaaacgtttggtttgcacgattccgctgaacgtattgagttctgttcattttagcccaccactgtccccgcaacgcatggccgctgcgaacattggccatgttaaccaggctgtcaaagtgcatgcggaagtcagttgtccggatatgcgttcatggtcgggtatctcctatccgttcaacaaattagcctacgctatcggcgatggcacgaccccagcgggtaatacgcatattgtgtgccttgggggggcccataatcatatccagccggaagaggacgtggaagcaacgaagatggccgttgaaaacatgtcgcctgggaatatggatatcaaacgtctggtcttccacaactggtgcaaggatgaatttgccaaaggcgcgtggttcttcgcccctccacagctgctgtcaaagagcctggatgaactgcgctgccgtcacggtaatgtcctgtttgcaaactccgattgggccttaggttggcgtggttttatcgatggtgctatcgaggagggcacccgcgcagcggttactgtaattgaggaactgcgtcctgcgcctgcggtgcgttcccacctg

SEQ ID NO: 470 - protein, 495 aa, synthetic construct
  REGION 1..495: note = Variant of monoamine oxidase
MTSRDGYQWTPETGLTQGVPSLGVISPPTNIEDTDKDGPWDVIVIGGGYCGLTATRDLTVAGFKTLLLEARDRIGGRSWSSNIDGYLYEMGGTWVHWHQSHVWREITRYKMHNALSPSFNFSRGVNHFQLRTNPTTSTYMTHEAEDELLRSALHKFTNVDGTNGRTVLPFPHDMFYVPEFRKYDEMSYSERIDQIRDELSLNERSSLEAFILLCSGGTLENSSFGEFLHWWAMSGYTYQGCMDCLISYKFKDGQSAFARRFWEEAAGTGRLGYVFGCPVRSVVNERDAVRVTARDGREFAAKRLVCTIPLNVLSSVHFSPPLSPQRMAAANIGHVNQAVKVHAEVSCPDMRSWSGISYPFNKLAYAIGDGTTPAGNTHIVCLGGAHNHIQPEEDVEATKMAVENMSPGNMDIKRLVFHNWCKDEFAKGAWFFAPPQLLSKSLDELRCRHGNVLFANSDWALGWRGFIDGAIEEGTRAAVTVIEELRPAPAVRSHL

SEQ ID NO: 471 - DNA, 1485 bp, synthetic construct
  misc_feature 1..1485: note = Variant of monoamine oxidase
  source 1..1485: mol_type = other DNA
atgaccagccgcgacggctatcagtggaccccggaaacgggtctgacccagggcgtaccgtccctgggtgtcatttcgccgccgactaacatcgaagataccgataaggacgggccttgggatgtcattgtcattgggggcgggtattgtgggctgaccgcaacccgtgatttaaccgtcgcagggttcaagacgctgctgctggaggcccgtgatcgtattggtggccgctcctggagcagtcgcattgacggttacccgtatgagatgggtggcacttgggttcattggcatcaatctcacgtgtggcgtgaaatcacgcgttataaaatgcacaacgcgctgtctccatcatttaacttttcacgtggcgtgaatcacttccaactgcgtaccaatccgaccaccagtacgtacatgacgcacgaagcggaggatgaactgctgcgtagcgcattgcataaattcaccaatgtcgacggcactaatggccgtacagtgttgccgttcccacatgatatgttttatgtgccggaatttcgcaagtatgacgaaatgtcatattccgaacgcattgaccagatccgcgacgaactgtctttgaacgaacgctctagtttagaggctttcattttattatgtagcggtggcaccctggaaaactccagctttggtgaatttctgcattggtgggcaatgtcgggttacacgtatcagggctgtatggattgtttaatctcctataaatttaaggatggccagagtgcgttcgcgcgtcgcttctgggaagaagccgctggcactggccgtctgggctatgtctttggttgtccggtgcgttctgtggtgaacgaacgcgacgcagtacgtgttaccgcacgtgacggtcgcgaattcgcagcgaaacgtttggtttgcacgattccgctgaacgtattgagttctgttcattttagcccaccactgtccccgcaacgcatggccgctgcgaacattggccatgttaaccaggctgtcaaagtgcatgcggaagtcagttgtccggatatgcgttcatggtcgggtatctcctatccgttcaacaaattagcctacgctatcggcgatggcacgaccccagcgggtaatacgcatattgtgtgccttgggggggcccataatcatatccagccggaagaggacgtggaagcaacgaagatggccgttgaaaacatgtcgcctgggaatatggatatcaaacgtctggtcttcgggaactggagcaaggatgaatttgccaaaggcgcgtggttcttcgcccctccacagctgctgtcaaagagcctggatgaactgcgctgccgtcacggtaatgtcctgtttgcaaactccgattgggccttaggttggcgtggttttatcgatggtgctatcgaggagggcacccgcgcagcggttactgtaattgaggaactgcgtcctgcgcctgcggtgcgttcccacctg

SEQ ID NO: 472 - protein, 495 aa, synthetic construct
  REGION 1..495: note = Variant of monoamine oxidase
MTSRDGYQWTPETGLTQGVPSLGVISPPTNIEDTDKDGPWDVIVIGGGYCGLTATRDLTVAGFKTLLLEARDRIGGRSWSSRIDGYPYEMGGTWVHWHQSHVWREITRYKMHNALSPSFNFSRGVNHFQLRTNPTTSTYMTHEAEDELLRSALHKFTNVDGTNGRTVLPFPHDMFYVPEFRKYDEMSYSERIDQIRDELSLNERSSLEAFILLCSGGTLENSSFGEFLHWWAMSGYTYQGCMDCLISYKFKDGQSAFARRFWEEAAGTGRLGYVFGCPVRSVVNERDAVRVTARDGREFAAKRLVCTIPLNVLSSVHFSPPLSPQRMAAANIGHVNQAVKVHAEVSCPDMRSWSGISYPFNKLAYAIGDGTTPAGNTHIVCLGGAHNHIQPEEDVEATKMAVENMSPGNMDIKRLVFGNWSKDEFAKGAWFFAPPQLLSKSLDELRCRHGNVLFANSDWALGWRGFIDGAIEEGTRAAVTVIEELRPAPAVRSHL

SEQ ID NO: 473 - DNA, 1485 bp, synthetic construct
  misc_feature 1..1485: note = Variant of monoamine oxidase
  source 1..1485: mol_type = other DNA
atgaccagccgcgacggctatcagtggaccccggaaacgggtctgacccagggcgtaccgtccctgggtgtcatttcgccgccgactaacatcgaagataccgataaggacgggccttgggatgtcattgtcattgggggcgggtattgtgggctgaccgcaacccgtgatttaaccgtcgcagggttcaagacgctgctgctggaggcccgtgatcgtattggtggccgctcctggagcagtaacattgacggttacccgtatgagatgggtggcacttgggttcattggcatcaatctcacgtgtggcgtgaaatcacgcgttataaaatgcacaacgcgctgtctccatcatttaacttttcacgtggcgtgaatcacttccaactgcgtaccaatccgaccaccagtacgtacatgacgcacgaagcggaggatgaactgctgcgtagcgcattgcataaattcaccaatgtcgacggcactaatggccgtacagtgttgccgttcccacatgatatgttttatgtgccggaatttcgcaagtatgacgaaatgtcatattccgaacgcattgaccagatccgcgacgaactgtctttgaacgaacgctctagtttagaggctttcattttattatgtagcggtggcaccctggaaaactccagctttggtgaatttctgcattggtgggcaatgtcgggttacacgtatcagggctgtatggattgtttaatctcctataaatttaaggatggccagagtgcgttcgcgcgtcgcttctgggaagaagccgctggcactggccgtctgggctatgtctttggttgtccggtgcgttctgtggtgaacgaacgcgacgcagtacgtgttaccgcacgtgacggtcgcgaattcgcagcgaaacgtttggtttgcacgattccgtcgaacgtattgagttctgttcattttagcccaccactgtccccgcaacgcatggccgctgcgaacattggccatgttaaccagagcgtcaaagtgcatgcggaagtcagttgtccggatatgcgttcatggtcgggtatctcctatccgttcaacaaattagcctacgctatcggcgatggcacgaccccagcgggtaatacgcatattgtgtgccttgggggggcccataatcatatccagccggaagaggacgtggaagcaacgaagatggccgttgaaaacatgtcgcctgggaatatggatatcaaacgtctggtcttcgggaactggtgcaaggatgaatttgccaaaggcgcgtggttcttcgcccctccacagctgctgtcaaagagcctggatgaactgcgctgccgtcacggtaatgtcctgtttgcaaactccgattgggccttaggttggcgtggttttatcgatggtgctatcgaggagggcacccgcgcagcggttactgtaattgaggaactgcgtcctgcgcctgcggtgcgttcccacctg

SEQ ID NO: 474 - protein, 495 aa, synthetic construct
  REGION 1..495: note = Variant of monoamine oxidase
MTSRDGYQWTPETGLTQGVPSLGVISPPTNIEDTDKDGPWDVIVIGGGYCGLTATRDLTVAGFKTLLLEARDRIGGRSWSSNIDGYPYEMGGTWVHWHQSHVWREITRYKMHNALSPSFNFSRGVNHFQLRTNPTTSTYMTHEAEDELLRSALHKFTNVDGTNGRTVLPFPHDMFYVPEFRKYDEMSYSERIDQIRDELSLNERSSLEAFILLCSGGTLENSSFGEFLHWWAMSGYTYQGCMDCLISYKFKDGQSAFARRFWEEAAGTGRLGYVFGCPVRSVVNERDAVRVTARDGREFAAKRLVCTIPSNVLSSVHFSPPLSPQRMAAANIGHVNQSVKVHAEVSCPDMRSWSGISYPFNKLAYAIGDGTTPAGNTHIVCLGGAHNHIQPEEDVEATKMAVENMSPGNMDIKRLVFGNWCKDEFAKGAWFFAPPQLLSKSLDELRCRHGNVLFANSDWALGWRGFIDGAIEEGTRAAVTVIEELRPAPAVRSHL

SEQ ID NO: 475 - DNA, 1485 bp, synthetic construct
  misc_feature 1..1485: note = Variant of monoamine oxidase
  source 1..1485: mol_type = other DNA
atgaccagccgcgacggctatcagtggaccccggaaacgggtctgacccagggcgtaccgtccctgggtgtcatttcgccgccgactaacatcgaagataccgataaggacgggccttgggatgtcattgtcattgggggcgggtattgtgggctgaccgcaacccgtgatttaaccgtcgcagggttcaagacgctgctgctggaggcccgtgatcgtattggtggccgctcctggagcagtaacattgacggttacggttatgagatgggtggcacttgggttcattggcatcaatctcacgtgtggcgtgaaatcacgcgttataaaatgcacaacgcgctgtctccgtcatttaacttttcacgtggcgtgaatcacttccaactgcgtaccaatccgaccaccagtacgtacatgacgcacgaagcggaggatgaactgctgcgtagcgcattgcataaattcaccaatgtcgacggcactaatggccgtacagtgttgccgttcccacatgatatgttttatgtgccggaatttcgcaagtatgacgaaatgtcatattccgaacgcattgaccagatccgcgacgaactgtctttgaacgaacgctctagtttagaggctttcattttattatgtagcggtggcaccctggaaaactccagctttggtgaatttctgcattggtgggcaatgtcgggttacacgtatcagggctgtatggattgtttaatctcctataaatttaaggatggccagagtgcgttcgcgcgtcgcttctgggaagaagccgctggcactggccgtctgggctatgtctttggttgtccggtgcgttctgtggtgaacgaacgcgacgcagtacgtgttaccgcacgtgacggtcgcgaattcgcagcgaaacgtttggtttgcacgattccgtcgaacgtattgagttctgttcattttagcccaccactgtccccgcaacgcatggccgctgcgaacattggccatgttaaccagagcgtcaaagtgcatgcggaagtcagttgtccggatatgcgttcatggtcgggtatctcctatccgttcaacaaattagcctacgctatcggcgatggcacgaccccagcgggtaatacgcatattgtgtgccttgggggggcccataatcatatccagccggaagaggacgtggaagcaacgaagatggccgttgaaaacatgtcgcctgggaatatggatatcaaacgtctggtcttccataactggtgcaaggatgaatttgccaaaggcgcgtggttcttcgcccctccacagctgctgtcaaagagcctggatgaactgcgctgccgtcacggtaatgtcctgtttgcaaactccgattgggccttaggttggcgtggttttatcgatggtgctatcgaggagggcacccgcgcagcggttactgtaattgaggaactgcgtcctgcgcctgcggtgcgttcccacctg

SEQ ID NO: 476 - protein, 495 aa, synthetic construct
  REGION 1..495: note = Variant of monoamine oxidase
MTSRDGYQWTPETGLTQGVPSLGVISPPTNIEDTDKDGPWDVIVIGGGYCGLTATRDLTVAGFKTLLLEARDRIGGRSWSSNIDGYGYEMGGTWVHWHQSHVWREITRYKMHNALSPSFNFSRGVNHFQLRTNPTTSTYMTHEAEDELLRSALHKFTNVDGTNGRTVLPFPHDMFYVPEFRKYDEMSYSERIDQIRDELSLNERSSLEAFILLCSGGTLENSSFGEFLHWWAMSGYTYQGCMDCLISYKFKDGQSAFARRFWEEAAGTGRLGYVFGCPVRSVVNERDAVRVTARDGREFAAKRLVCTIPSNVLSSVHFSPPLSPQRMAAANIGHVNQSVKVHAEVSCPDMRSWSGISYPFNKLAYAIGDGTTPAGNTHIVCLGGAHNHIQPEEDVEATKMAVENMSPGNMDIKRLVFHNWCKDEFAKGAWFFAPPQLLSKSLDELRCRHGNVLFANSDWALGWRGFIDGAIEEGTRAAVTVIEELRPAPAVRSHL

SEQ ID NO: 477 - DNA, 1485 bp, synthetic construct
  misc_feature 1..1485: note = Variant of monoamine oxidase
  source 1..1485: mol_type = other DNA
atgaccagccgcgacggctatcagtggaccccggaaacgggtctgacccagggcgtaccgtccctgggtgtcatttcgccgccgactaacatcgaagataccgataaggacgggccttgggatgtcattgtcattgggggcgggtattgtgggctgaccgcaacccgtgatttaaccgtcgcagggttcaagacgctgctgctggaggcccgtgatcgtattggtggccgctcctggagcagtaacattgacggttacggttatgagatgggtggcacttgggttcattggcatcaatctcacgtgtggcgtgaaatcacgcgttataaaatgcacaacgcgctgtctccatcatttaacttttcacgtggcgtgaatcacttccaactgcgtaccaatccgaccaccagtacgtacatgacgcacgaagcggaggatgaactgctgcgtagcgcattgcataaattcaccaatgtcgacggcactaatggccgtacagtgttgccgttcccacatgatatgttttatgtgccggaatttcgcaagtatgacgaaatgtcatattccgaacgcattgaccagatccgcgacgaactgtctttgaacgaacgctctagtttagaggctttcattttattatgtagcggtggcaccctggaaaactccagctttggtgaatttctgcattggtgggcaatgtcgggttacacgtatcagggctgtatggattgtttaatctcctataaatttaaggatggccagagtgcgttcgcgcgtcgcttctgggaagaagccgctggcactggccgtctgggctatgtctttggttgtccggtgcgttctgtggtgaacgaacgcgacgcagtacgtgttaccgcacgtgacggtcgcgaattcgcagcgaaacgtttggtttgcacgattccgctgaacgtattgagttctgttcattttagcccaccactgtccccgcaacgcatggccgctgcgaacattggccatgttaaccaggctgtcaaagtgcatgcggaagtcagttgtccggatatgcgttcatggtcgggtatctcctatccgttcaacaaattagcctacgctatcggcgatggcacgaccccagcgggtaatacgcatattgtgtgccttgggggggcccataatcatatccagccggaagaggacgtggaagcaacgaagatggccgttgaaaacatgtcgcctgggaatatggatatcaaacgtctggtcttccacaactggtgcaaggatgaatttgccaaaggcgcgtggttcttcgcccctccacagctgctgtcaaagagcctggatgaactgcgctgccgtcacggtaatgtcctgtttgcaaactccgattgggccttaggttggcgtggttttatcgatggtgctatcgaggagggcacccgcgcagcggttactgtaattgaggaactgcgtcctgcgcctgcggtgcgttcccacctg

SEQ ID NO: 478 - protein, 495 aa, synthetic construct
  REGION 1..495: note = Variant of monoamine oxidase
MTSRDGYQWTPETGLTQGVPSLGVISPPTNIEDTDKDGPWDVIVIGGGYCGLTATRDLTVAGFKTLLLEARDRIGGRSWSSNIDGYGYEMGGTWVHWHQSHVWREITRYKMHNALSPSFNFSRGVNHFQLRTNPTTSTYMTHEAEDELLRSALHKFTNVDGTNGRTVLPFPHDMFYVPEFRKYDEMSYSERIDQIRDELSLNERSSLEAFILLCSGGTLENSSFGEFLHWWAMSGYTYQGCMDCLISYKFKDGQSAFARRFWEEAAGTGRLGYVFGCPVRSVVNERDAVRVTARDGREFAAKRLVCTIPLNVLSSVHFSPPLSPQRMAAANIGHVNQAVKVHAEVSCPDMRSWSGISYPFNKLAYAIGDGTTPAGNTHIVCLGGAHNHIQPEEDVEATKMAVENMSPGNMDIKRLVFHNWCKDEFAKGAWFFAPPQLLSKSLDELRCRHGNVLFANSDWALGWRGFIDGAIEEGTRAAVTVIEELRPAPAVRSHL

SEQ ID NO: 479 - DNA, 1485 bp, synthetic construct
  misc_feature 1..1485: note = Variant of monoamine oxidase
  source 1..1485: mol_type = other DNA
atgaccagccgcgacggctatcagtggaccccggaaacgggtctgacccagggcgtaccgtccctgggtgtcatttcgccgccgactaacatcgaagataccgataaggacgggccttgggatgtcattgtcattgggggcgggtattgtgggctgaccgcaacccgtgatttaaccgtcgcagggttcaagacgctgctgctggaggcccgtgatcgtattggtggccgctcctggagcagtaacattgacggttacctgtatgagatgggtggcacttgggttcattggcatcaatctcacgtgtggcgtgaaatcacgcgttataaaatgcacaacgcgctgtctccatcatttaacttttcacgtggcgtgaatcacttccaactgcgtaccaatccgaccaccagtacgtacatgacgcacgaagcggaggatgaactgctgcgtagcgcattgcataaattcaccaatgtcgacggcactaatggccgtacagtgttgccgttcccacatgatatgttttatgtgccggaatttcgcaagtatgacgaaatgtcatattccgaacgcattgaccagatccgcgacgaactgtctttgaacgaacgctctagtttagaggctttcattttattatgtagcggtggcacctcggaaaactccagctttggtgaatttctgcattggtgggcaatgtcgggttacacgtatcagggctgtatggattgtttaatctcctataaatttaaggatggccagagtgcgttcgcgcgtcgcttctgggaagaagccgctggcactggccgtctgggctatgtctttggttgtccggtgcgttctgtggtgaacgaacgcgacgcagtacgtgttaccgcacgtgacggtcgcgaattcgcagcgaaacgtttggtttgcacgattccgctgaacgtattgagttctgttcattttagcccaccactgtccccgcaacgcatggccgctgcgaacattggccatgttaaccagggcgtcaaagtgcatgcggaagtcagttgtccggatatgcgttcatggtcgggtatctcctatccgttcaacaaattagcctacgctatcggcgatggcacgaccccagcgggtaatacgcatattgtgtgccttgggggggcccataatcatatccagccggaagaggacgtggaagcaacgaagatggccgttgaaaacatgtcgcctgggaatatggatatcaaacgtctggtcttccacaactggtgcaaggatgaatttgccaaaggcgcgtggttcttcgcccctccacagctgctgtcaaagagcctggatgaactgcgctgccgtcacggtaatgtcctgtttgcaaactccgattgggccttaggttggcgtggttttatcgatggtgctatcgaggagggcacccgcgcagcggttactgtaattgaggaactgcgtcctgcgcctgcggtgcgttcccacctg

SEQ ID NO: 480 - protein, 495 aa, synthetic construct
  REGION 1..495: note = Variant of monoamine oxidase
MTSRDGYQWTPETGLTQGVPSLGVISPPTNIEDTDKDGPWDVIVIGGGYCGLTATRDLTVAGFKTLLLEARDRIGGRSWSSNIDGYLYEMGGTWVHWHQSHVWREITRYKMHNALSPSFNFSRGVNHFQLRTNPTTSTYMTHEAEDELLRSALHKFTNVDGTNGRTVLPFPHDMFYVPEFRKYDEMSYSERIDQIRDELSLNERSSLEAFILLCSGGTSENSSFGEFLHWWAMSGYTYQGCMDCLISYKFKDGQSAFARRFWEEAAGTGRLGYVFGCPVRSVVNERDAVRVTARDGREFAAKRLVCTIPLNVLSSVHFSPPLSPQRMAAANIGHVNQGVKVHAEVSCPDMRSWSGISYPFNKLAYAIGDGTTPAGNTHIVCLGGAHNHIQPEEDVEATKMAVENMSPGNMDIKRLVFHNWCKDEFAKGAWFFAPPQLLSKSLDELRCRHGNVLFANSDWALGWRGFIDGAIEEGTRAAVTVIEELRPAPAVRSHL

SEQ ID NO: 481 - DNA, 1485 bp, synthetic construct
  misc_feature 1..1485: note = Variant of monoamine oxidase
  source 1..1485: mol_type = other DNA
atgaccagccgcgacggctatcagtggaccccggaaacgggtctgacccagggcgtaccgtccctgggtgtcatttcgccgccgactaacatcgaagataccgataaggacgggccttgggatgtcattgtcattgggggcgggtattgtgggctgaccgcaacccgtgatttaaccgtcgcagggttcaagacgctgctgctggaggcccgtgatcgtattggtggccgctcctgggtgagtaatattgacggttacccgtatgagatgggtggcacttgggttcattggcatcaatctcacgtgtggcgtgaaatcacgcgttataaaatgcacaacgcgctgtctccatcatttaacttttcacgtggcgtgaatcacttccaactgcgtaccaatccgaccaccagtacgtacatgacgcacgaagcggaggatgaactgctgcgtagcgcattgcataaattcaccaatgtcgacggcactaatggccgtacagtgttgccgttcccacatgatatgttttatgtgccggaatttcgcaagtatgacgaaatgtcatattccgaacgcattgaccagatccgcgacgaactgtctttgaacgaacgctctagtttagaggctttcattttattatgtagcggtggcaccctggaaaactccagctttggtgaatttctgcattggtgggcaatgtcgggttacacgtaccagggctgtatggattgtttaatctcctataaatttaaggatggccagagtgcgttcgcgcgtcgcttctgggaagaagccgctggcactggccgtctgggctatgtctttggttgtccggtgcgttctgtggtgaacgaacgcgacgcagtacgtgttaccgcacgtgacggtcgcgaattcgcagcgaaacgtttggtttgcacgattccgctgaacgtattgagttctgttcattttagcccaccactgtccccgcaacgcatggccgctgcgaacatcggccatgttaaccagtgcgtcaaagtgcatgcggaagtcagttgtccggatatgcgttcatggtcgggtatctcctatccgttcaacaaattagcctacgctatcggcgatggcacgaccccagcgggtaatacgcatattgtgtgccttgggggggccgagaatcatatccagccggaagaggacgtggaagcaacgaagatggccgttgaaaacatgtcgcctgggaatatggatatcaaacgtctggtcttccacaactggtgcaaggatgaatttgccaaaggcgggtggttcttcgcccctccacagctgctgtcaaagagcctggatgaactgcgctgccgtcacggtaatgtcctgtttgcaaactccgattgggccttaggttggcgtggttttatcgatggtgctatcgaggagggcacccgcgcagcggttactgtaattgaggaactgcgtcctgcgcctgcggtgcgttcccacctg

SEQ ID NO: 482 - protein, 495 aa, synthetic construct
  REGION 1..495: note = Variant of monoamine oxidase
MTSRDGYQWTPETGLTQGVPSLGVISPPTNIEDTDKDGPWDVIVIGGGYCGLTATRDLTVAGFKTLLLEARDRIGGRSWVSNIDGYPYEMGGTWVHWHQSHVWREITRYKMHNALSPSFNFSRGVNHFQLRTNPTTSTYMTHEAEDELLRSALHKFTNVDGTNGRTVLPFPHDMFYVPEFRKYDEMSYSERIDQIRDELSLNERSSLEAFILLCSGGTLENSSFGEFLHWWAMSGYTYQGCMDCLISYKFKDGQSAFARRFWEEAAGTGRLGYVFGCPVRSVVNERDAVRVTARDGREFAAKRLVCTIPLNVLSSVHFSPPLSPQRMAAANIGHVNQCVKVHAEVSCPDMRSWSGISYPFNKLAYAIGDGTTPAGNTHIVCLGGAENHIQPEEDVEATKMAVENMSPGNMDIKRLVFHNWCKDEFAKGGWFFAPPQLLSKSLDELRCRHGNVLFANSDWALGWRGFIDGAIEEGTRAAVTVIEELRPAPAVRSHL

SEQ ID NO: 483 - DNA, 1485 bp, synthetic construct
  misc_feature 1..1485: note = Variant of monoamine oxidase
  source 1..1485: mol_type = other DNA
atgaccagccgcgacggctatcagtggaccccggaaacgggtctgacccagggcgtaccgtccctgggtgtcatttcgccgccgactaacatcgaagataccgataaggacgggccttgggatgtcattgtcattgggggcgggtattgtgggctgaccgcaacccgtgatttaaccgtcgcagggttcaagacgctgctgctggaggcccgtgatcgtattggtggccgctcctggcacagtaatattgacggttacccgtatgagatgggtggcacttgggttcattggcatcaatctcacgtgtggcgtgaaatcacgcgttataaaatgcacaacgcgctgtctccatcatttaacttttcacgtggcgtgaatcacttccaactgcgtaccaatccgaccaccagtacgtacatgacgcacgaagcggaggatgaactgctgcgtagcgcattgcataaattcaccaatgtcgacggcactaatggccgtacagtgttgccgttcccacatgatatgttttatgtgccggaatttcgcaagtttgatgaaatgtcatattccgaacgcattgaccagatccgcgacgaactgtctttgaacgaacgctctagtttagaggctttcattttattatgtagcggtggcaccctggaaaactccagctttggtgaatttctgcattggtgggcaatgtcgggttacacgtaccagggctgtatggattgtttaatctcctataaatttaaggatggccagagtgcgttcgcgcgtcgcttctgggaagaagccgctggcactggccgtctgggctatgtctttggttgtccggtgcgttctgtggtggatgaacgcgacgcagtacgtgttaccgcacgtgacggtcgcgaattcgcagcgaaacgtttggtttgcacgattccgctgaacgtattgagttctgttcattttagcccaccactgtccccgcaacgcatggccgctgcgaacggcggccatgttaaccagtgcgtcaaagtgcatgcggaagtcagttgtccggatatgcgttcatggtcgggtatctcctatccgttcaacaaattagcctacgctatcggcgatggcacgaccccagcgggtaatacgcatattgtggcgcttgggggggccgagaatcatatccagccggaagaggacgtggaagcaacgaagatggccgttgaaaacatgtcgcctgggaatatggatatcaaacgtctggtcttccacaactggtgcaaggatgaatttgccaaaggcgggtggttcttcgcccctccacagctgctgtcaaagagcctggatgaactgcgctgccgtcacggtaatgtcctgtttgcaaactccgattgggccttaggttggcgtggttttatcgatggtgctatcgaggagggcacccgcgcagcggttactgtaattgaggaactgcgtcctgcgcctgcggtgcgttcccacctg

SEQ ID NO: 484 - protein, 495 aa, synthetic construct
  REGION 1..495: note = Variant of monoamine oxidase
MTSRDGYQWTPETGLTQGVPSLGVISPPTNIEDTDKDGPWDVIVIGGGYCGLTATRDLTVAGFKTLLLEARDRIGGRSWHSNIDGYPYEMGGTWVHWHQSHVWREITRYKMHNALSPSFNFSRGVNHFQLRTNPTTSTYMTHEAEDELLRSALHKFTNVDGTNGRTVLPFPHDMFYVPEFRKFDEMSYSERIDQIRDELSLNERSSLEAFILLCSGGTLENSSFGEFLHWWAMSGYTYQGCMDCLISYKFKDGQSAFARRFWEEAAGTGRLGYVFGCPVRSVVDERDAVRVTARDGREFAAKRLVCTIPLNVLSSVHFSPPLSPQRMAAANGGHVNQCVKVHAEVSCPDMRSWSGISYPFNKLAYAIGDGTTPAGNTHIVALGGAENHIQPEEDVEATKMAVENMSPGNMDIKRLVFHNWCKDEFAKGGWFFAPPQLLSKSLDELRCRHGNVLFANSDWALGWRGFIDGAIEEGTRAAVTVIEELRPAPAVRSHL

SEQ ID NO: 485 - DNA, 1485 bp, synthetic construct
  misc_feature 1..1485: note = Variant of monoamine oxidase
  source 1..1485: mol_type = other DNA
atgaccagccgcgacggctatcagtggaccccggaaacgggtctgacccagggcgtaccgtccctgggtgtcatttcgccgccgactaacatcgaagataccgataaggacgggccttgggatgtcattgtcattgggggcgggtattgtgggctgaccgcaacccgtgatttaaccgtcgcagggttcaagacgctgctgctggaggcccgtgatcgtattggtggccgctcctggagcagtaatattgacggttacccgtatgagatgggtggcacttgggttcattggcatcaatctcacgtgtggcgtgaaatcacgcgttataaaatgcacaacgcgctgtctccatcatttaacttttcacgtggcgtgaatcacttccaactgcgtaccaatccgaccaccagtacgtacatgacgcacgaagcggaggatgaactgctgcgtagcgcattgcataaattcaccaatgtcgacggcactaatggccgtacagtgttgccgttcccacatgatatgttttatgtgccggaatttcgcaagtatgacgaaatgtcatattccgaacgcattgaccagatccgcgacgaactgtctttgaacgaacgctctagtttagaggctttcattttattatgtagcggtggcggcctggaaaactccagctttggtgaatttctgcattggtgggcaatgtcgggttacacgtatcagggctgtatggattgtttaatctcctataaatttaaggatggccagagtgcgttcgcgcgtagcttctgggaagaagccgctggcactggccgtctgggctatgtctttggttgtccggtgcgttctgtggtgaacgaacgcgacgcagtacgtgttaccgcacgtgacggtcgcgaattcgcagcgaaacgtttggtttgcacgattccgctgaacgtattgagttctgttcattttagcccaccactgtccccgcaacgcatggccgctgcgaacattggccatgttaaccaggctgtcaaagtgcatgcggaagtcagttgtccggatatgcgttcatggtcgggtatctcctatccgttcaacaaattagcctacgctatcggcgatggcacgaccccagcgggtaatacgcatattgtgtgccttgggggggcccataatcatatccagccggaagaggacgtggaagcaacgaagatggccgttgaaaacatgtcgcctgggaatatggatatcaaacgtctggtcttccacaactggtgcaaggatgaatttgccaaaggcgcgtggttcttcgcccctccacagctgctgtcaaagagcctggatgaactgcgctgccgtcacggtaatgtcctgtttgcaaactccgattgggccttaggttggcgtggttttatcgatggtgctatcgaggagggcacccgcgcagcggttactgtaattgaggaactgcgtcctgcgcctgcggtgcgttcccacctg

SEQ ID NO: 486 - protein, 495 aa, synthetic construct
  REGION 1..495: note = Variant of monoamine oxidase
MTSRDGYQWTPETGLTQGVPSLGVISPPTNIEDTDKDGPWDVIVIGGGYCGLTATRDLTVAGFKTLLLEARDRIGGRSWSSNIDGYPYEMGGTWVHWHQSHVWREITRYKMHNALSPSFNFSRGVNHFQLRTNPTTSTYMTHEAEDELLRSALHKFTNVDGTNGRTVLPFPHDMFYVPEFRKYDEMSYSERIDQIRDELSLNERSSLEAFILLCSGGGLENSSFGEFLHWWAMSGYTYQGCMDCLISYKFKDGQSAFARSFWEEAAGTGRLGYVFGCPVRSVVNERDAVRVTARDGREFAAKRLVCTIPLNVLSSVHFSPPLSPQRMAAANIGHVNQAVKVHAEVSCPDMRSWSGISYPFNKLAYAIGDGTTPAGNTHIVCLGGAHNHIQPEEDVEATKMAVENMSPGNMDIKRLVFHNWCKDEFAKGAWFFAPPQLLSKSLDELRCRHGNVLFANSDWALGWRGFIDGAIEEGTRAAVTVIEELRPAPAVRSHL

SEQ ID NO: 487 - DNA, 1485 bp, synthetic construct
  misc_feature 1..1485: note = Variant of monoamine oxidase
  source 1..1485: mol_type = other DNA
atgaccagccgcgacggctatcagtggaccccggaaacgggtctgacccagggcgtaccgtccctgggtgtcatttcgccgccgactaacatcgaagataccgataaggacgggccttgggatgtcattgtcattgggggcgggtattgtgggctgaccgcaacccgtgatttaaccgtcgcagggttcaagacgctgctgctggaggcccgtgatcgtattggtggccgctcctggagcagtaacattgacggttacctgtatgagatgggtggcacttgggttcattggcatcaatctcacgtgtggcgtgaaatcacgcgttataaaatgcacaacgcgctgtctaaatcatttaacttttcacgtggcgtgaatcacttccaactgcgtaccaatccgaccaccagtacgtacatgacgcacgaagcggaggatgaactgctgcgtagcgcattgcataaattcaccaatgtcgacggcactaatggccgtacagtgttgccgttcccacatgatatgttttatgtgccggaatttcgcaagtatgacgaaatgtcatattccgaacgcattgaccagatccgcgacgaactgtctttgaacgaacgctctagtttagaggctttcattttattatgtagcggtggcaccctggaaaactccagctttggtgaatttctgcattggtgggcaatgtcgggttacacgtatcagggctgtatggattgtttaatctcctataaatttaaggatggccagagtgcgttcgcgcgtcgcttctgggaagaagccgctggcactggccgtctgggctatgtctttggttgtccggtgcgttctgtggtgaacgaacgcgacgcagtacgtgttaccgcacgtgacggtcgcgaattcgcagcgaaacgtttggtttgcacgattccgctgaacgtattgagttctgttcattttagcccaccactgtccccgcaacgcatggccgctgcgaacattggccatgttaaccagtgcgtcaaagtgcatgcggaagtcagttgtccggatatgcgttcatggtcgggtatctcctatccgttcaacaaattagcctacgctatcggcgatggcacgaccccagcgggtaatacgcatattgtgtgccttgggggggcccataatcatatccagccggaagaggacgtggaagcaacgaagatggccgttgaaaacatgtcgcctgggaatatggatatcaaacgtctggtcttccacaactggtgcaaggatgaatttgccaaaggcgcgtggttcttcgcccctccacagctgctgtcaaagagcctggatgaactgcgctgccgtcacggtaatgtcctgtttgcaaactccgattgggccttaggttggcgtggttttatcgatggtgctatcgaggagggcacccgcgcagcggttactgtaattgaggaactgcgtcctgcgcctgcggtgcgttcccacctg

SEQ ID NO: 488 - protein, 495 aa, synthetic construct
  REGION 1..495: note = Variant of monoamine oxidase
MTSRDGYQWTPETGLTQGVPSLGVISPPTNIEDTDKDGPWDVIVIGGGYCGLTATRDLTVAGFKTLLLEARDRIGGRSWSSNIDGYLYEMGGTWVHWHQSHVWREITRYKMHNALSKSFNFSRGVNHFQLRTNPTTSTYMTHEAEDELLRSALHKFTNVDGTNGRTVLPFPHDMFYVPEFRKYDEMSYSERIDQIRDELSLNERSSLEAFILLCSGGTLENSSFGEFLHWWAMSGYTYQGCMDCLISYKFKDGQSAFARRFWEEAAGTGRLGYVFGCPVRSVVNERDAVRVTARDGREFAAKRLVCTIPLNVLSSVHFSPPLSPQRMAAANIGHVNQCVKVHAEVSCPDMRSWSGISYPFNKLAYAIGDGTTPAGNTHIVCLGGAHNHIQPEEDVEATKMAVENMSPGNMDIKRLVFHNWCKDEFAKGAWFFAPPQLLSKSLDELRCRHGNVLFANSDWALGWRGFIDGAIEEGTRAAVTVIEELRPAPAVRSHL

SEQ ID NO: 489 - DNA, 1485 bp, synthetic construct
  misc_feature 1..1485: note = Variant of monoamine oxidase
  source 1..1485: mol_type = other DNA
atgaccagccgcgacggctatcagtggaccccggaaacgggtctgacccagggcgtaccgtccctgggtgtcatttcgccgccgactaacatcgaagataccgataaggacgggccttgggatgtcattgtcattgggggcgggtattgtgggctgaccgcaacccgtgatttaaccgtcgcagggttcaagacgctgctgctggaggcccgtgatcgtattggtggccgctcctggagcagtaatattgacggttacccgtatgagatgggtggcacttgggttcattggcatcaatctcacgtgtggcgtgaaatcacgcgttataaaatgcacaacgcgctgtctccatcatttaacttttcacgtggcgtgaatcacttccaactgcgtaccaatccgaccaccagtacgtacatgacgcacgaagcggaggatgaactgctgcgtagcgcattgcataaattcaccaatgtcgacggcactaatggccgtacagtgttgccgttcccacatgatatgttttatgtgccggaatttcgcaagtatgacgaaatgtcatattccgaacgcattgaccagatccgcgacgaactgtctttgaacgaacgctctagtttagaggctttcattttattatgtagcggtggcaccctggaaaactccagctttggtgaatttctgcattggtgggcaatgtcgggttacacgcgtcagggctgtatggattgtttaatctcctataaatttaaggatggccagagtgcgttcgcgcgtcgcttctgggaagaagccgctggcactggccgtctgggctatgtctttggttgtccggtgcgttctgtggtggatgaacgcgacgcagtacgtgttaccgcacgtgacggtcgcgaattcgcagcgaaacgtttggtttgcacgattccgctgaacgtattgagttctgttcattttagcccaccactgtccccgcaacgcatggccgctgcgaacatcggccatgttaaccagtgcgtcaaagtgcatgcggaagtcagttgtccggatatgcgttcatggtcgggtatctcctatccgttcaacaaattagcctacgctatcggcgatggcacgaccccagcgggtaatacgcatattgtgtgccttgggggggccgagaatcatatccagccggaagaggacgtggaagcaacgaagatggccgttgaaaacatgtcgcctgggaatatggatatcaaacgtctggtcttccacaactggtgcaaggatgaatttgccaaaggcgggtggttcttcgcccctccacagctgctgtcaaagagcctggatgaactgcgctgccgtcacggtaatgtcctgtttgcaaactccgattgggccttaggttggcgtggttttatcgatggtgctatcgaggagggcacccgcgcagcggttactgtaattgaggaactgcgtcctgcgcctgcggtgcgttcccacctg

SEQ ID NO: 490 - protein, 495 aa, synthetic construct
  REGION 1..495: note = Variant of monoamine oxidase
MTSRDGYQWTPETGLTQGVPSLGVISPPTNIEDTDKDGPWDVIVIGGGYCGLTATRDLTVAGFKTLLLEARDRIGGRSWSSNIDGYPYEMGGTWVHWHQSHVWREITRYKMHNALSPSFNFSRGVNHFQLRTNPTTSTYMTHEAEDELLRSALHKFTNVDGTNGRTVLPFPHDMFYVPEFRKYDEMSYSERIDQIRDELSLNERSSLEAFILLCSGGTLENSSFGEFLHWWAMSGYTRQGCMDCLISYKFKDGQSAFARRFWEEAAGTGRLGYVFGCPVRSVVDERDAVRVTARDGREFAAKRLVCTIPLNVLSSVHFSPPLSPQRMAAANIGHVNQCVKVHAEVSCPDMRSWSGISYPFNKLAYAIGDGTTPAGNTHIVCLGGAENHIQPEEDVEATKMAVENMSPGNMDIKRLVFHNWCKDEFAKGGWFFAPPQLLSKSLDELRCRHGNVLFANSDWALGWRGFIDGAIEEGTRAAVTVIEELRPAPAVRSHL

SEQ ID NO: 491 - DNA, 1485 bp, synthetic construct
  misc_feature 1..1485: note = Variant of monoamine oxidase
  source 1..1485: mol_type = other DNA
atgaccagccgcgacggctatcagtggaccccggaaacgggtctgacccagggcgtaccgtccctgggtgtcatttcgccgccgactaacatcgaagataccgataaggacgggccttgggatgtcattgtcattgggggcgggtattgtgggctgaccgcaacccgtgatttaaccgtcgcagggttcaagacgctgctgctggaggcccgtgatcgtattggtggccgctcctggagcagtaatattgacggttacccgtatgagatgggtggcacttgggttcattggcatcaatcgcacgtgtggcgtgaaatcacgcgttataaaatgcacaacgcgctgtctccatcatttaacttttcacgtggcgtgaatcacttccaactgcgtaccaatccgaccaccagtacgtacatgacgcacgaagcggaggctgaactgatgcgtagcgcattgcataaattcaccaatgtcgacggcactaatggccgtacagtgttgccgttcccacatgatatgttttatgtgccggaatttcgcaagtatgacgaaatgtcatattccgaacgcattgaccagatccgcgacgaactgtctttgaacgaacgctctagtttagaggctttcattttattatgtagcggtggcaccctggaaaactccagctttggtgaatttctgcattggtgggcaatgtcgggttacacgtatcagggctgtattgattgtttaatgtcctataaatttaaggatggccagagtgcgttcgcgcgtcgcttctgggaagaagccgctggcactggccgtctgggctatgtctttggttgcccggtgcgttctgtggtgaacgaacgcgacgcagtacgtgttaccgcacgtgacggtcgcgaattcgcagcgaaacgtttggtttgcacgattccgctgaacgtattgagttctgttcattttagcccaccactgtccccgcaacgcatggccgctgcgaacattggccatgttaaccagtgcgtcaaagtgcatgcggaagtcagttgtccggatatgcgttcatggtcgggtatctcctatccgttcaacaaattagcctacgctatcggcgatggcacgaccccagcgggtaatacgcatattgtgtgccttgggggggcccataatcatatccagccggaagaggacgtggaagcaacgaagatggccgttgaaaacatgtcgcctgggaatatggatatcaaacgtctggtcttccacaactggtgcaaggatgaatttgccaaaggcgcgtggttcttcgcccctccacagctgctgtcaaagagcctggatgaacgtcgctgtcgtcacggtaatgtcctgtttgcaaactccgattgggccttaggttggcgtggttttatcgatggtgctatcgaggagggcacccgcgcagcggttactgtaattgaggaactgcgtcctgcgcctgcggtgcgttcccacctg

SEQ ID NO: 492 - protein, 495 aa, synthetic construct
  REGION 1..495: note = Variant of monoamine oxidase
MTSRDGYQWTPETGLTQGVPSLGVISPPTNIEDTDKDGPWDVIVIGGGYCGLTATRDLTVAGFKTLLLEARDRIGGRSWSSNIDGYPYEMGGTWVHWHQSHVWREITRYKMHNALSPSFNFSRGVNHFQLRTNPTTSTYMTHEAEAELMRSALHKFTNVDGTNGRTVLPFPHDMFYVPEFRKYDEMSYSERIDQIRDELSLNERSSLEAFILLCSGGTLENSSFGEFLHWWAMSGYTYQGCIDCLMSYKFKDGQSAFARRFWEEAAGTGRLGYVFGCPVRSVVNERDAVRVTARDGREFAAKRLVCTIPLNVLSSVHFSPPLSPQRMAAANIGHVNQCVKVHAEVSCPDMRSWSGISYPFNKLAYAIGDGTTPAGNTHIVCLGGAHNHIQPEEDVEATKMAVENMSPGNMDIKRLVFHNWCKDEFAKGAWFFAPPQLLSKSLDERRCRHGNVLFANSDWALGWRGFIDGAIEEGTRAAVTVIEELRPAPAVRSHL

SEQ ID NO: 493 - DNA, 1485 bp, synthetic construct
  misc_feature 1..1485: note = Variant of monoamine oxidase
  source 1..1485: mol_type = other DNA
atgaccagccgcgacggctatcagtggaccccggaaacgggtctgacccagggcgtaccgtccctgggtgtcatttcgccgccgactaacatcgaagataccgataaggacgggccttgggatgtcattgtcattgggggcgggtattgtgggctgaccgcaacccgtgatttaaccgtcgcagggttcaagacgctgctgctggaggcccgtgatcgtattggtggccgctcctggagcagtcgcattgacggttacctgtatgagatgggtggcacttgggttcattggcatcaatctcacgtgtggcgtgaaatcacgcgttataaaatgcacggcgcgctgtctccgtcatttaacttttcacgtggcgtgaatcacttccaactgcgtaccaatccgaccaccagtacgtacatgacgcacgaagcggaggatgaactgctgcgtagcgcattgcataaattcaccaatgtcgacggcactaatggccgtacagtgttgccgttcccacatgatatgttttatgtgccggaatttcgcaagtatgacgaaatgtcatattccgaacgcattgaccagatccgcgacgaactgtctttgaacgaacgctctagtttagaggctttcattttattatgtagcggtggcaccctggaaaactccagctttggtgaatttctgcattggtgggcaatgtcgggttacacgtatcagggctgtatggattgtttaatctcctataaatttaaggatggccagagtgcgttcgcgcgtcgcttctgggaagaagccgctggcactggccgtctgggctatgtctttggttgtccggtgcgttctgtggtgaacgaacgcgacgcagtacgtgttaccgcacgtgacggtcgcgaattcgcagcgaaacgtttggtttgcacgattccgctgaacgtattgagttctgttcattttagcccaccactgtccccgcaacgcatggccgctgcgaacattggccatgttaaccagtgcgtcaaagtgcatgcggaagtcagttgtccggatatgcgttcatggtcgggtatctcctatccgttcaacaaattagcctacgctatcggcgatggcacgaccccagcgggtaatacgcatattgtgtgccttgggggggcccataatcatatccagccggaagaggacgtggaagcaacgaagatggccgttgaaaacatgtcgcctgggaatatggatatcaaacgtctggtcttccataactggtgcaaggatgaatttgccaaaggcgcgtggttcttcgcccctccacagctgctgtcaaagagcctggatgaactgcgctgccgtcacggtaatgtcctgtttgcaaactccgattgggccttaggttggcgtggttttatcgatggtgctatcgaggagggcacccgcgcagcggttactgtaattgaggaactgcgtcctgcgcctgcggtgcgttcccacctg

SEQ ID NO: 494 - protein, 495 aa, synthetic construct
  REGION 1..495: note = Variant of monoamine oxidase
MTSRDGYQWTPETGLTQGVPSLGVISPPTNIEDTDKDGPWDVIVIGGGYCGLTATRDLTVAGFKTLLLEARDRIGGRSWSSRIDGYLYEMGGTWVHWHQSHVWREITRYKMHGALSPSFNFSRGVNHFQLRTNPTTSTYMTHEAEDELLRSALHKFTNVDGTNGRTVLPFPHDMFYVPEFRKYDEMSYSERIDQIRDELSLNERSSLEAFILLCSGGTLENSSFGEFLHWWAMSGYTYQGCMDCLISYKFKDGQSAFARRFWEEAAGTGRLGYVFGCPVRSVVNERDAVRVTARDGREFAAKRLVCTIPLNVLSSVHFSPPLSPQRMAAANIGHVNQCVKVHAEVSCPDMRSWSGISYPFNKLAYAIGDGTTPAGNTHIVCLGGAHNHIQPEEDVEATKMAVENMSPGNMDIKRLVFHNWCKDEFAKGAWFFAPPQLLSKSLDELRCRHGNVLFANSDWALGWRGFIDGAIEEGTRAAVTVIEELRPAPAVRSHL

SEQ ID NO: 495 - DNA, 1485 bp, synthetic construct
  misc_feature 1..1485: note = Variant of monoamine oxidase
  source 1..1485: mol_type = other DNA
atgaccagccgcgacggctatcagtggaccccggaaacgggtctgacccagggcgtaccgtccctgggtgtcatttcgccgccgactaacatcgaagataccgataaggacgggccttgggatgtcattgtcattgggggcgggtattgtgggctgaccgcaacccgtgatttaaccgtcgcagggttcaagacgctgctgctggaggcccgtgatcgtattggtggccgctcctggagcagtcgcattgacggttacggttatgagatgggtggcacttgggttcattggcatcaatctcacgtgtggcgtgaaatcacgcgttataaaatgcacaacgcgctgtctaaatcatttaacttttcacgtggcgtgaatcacttccaactgcgtaccaatccgaccaccagtacgtacatgacgcacgaagcggaggatgaactgctgcgtagcgcattgcataaattcaccaatgtcgacggcactaatggccgtacagtgttgccgttcccacatgatatgttttatgtgccggaatttcgcaagtatgacgaaatgtcatattccgaacgcattgaccagatccgcgacgaactgtctttgaacgaacgctctagtttagaggctttcattttattatgtagcggtggcaccctggaaaactccagctttggtgaatttctgcattggtgggcaatgtcgggttacacgtatcagggctgtatggattgtttaatctcctataaatttaaggatggccagagtgcgttcgcgcgtcgcttctgggaagaagccgctggcactggccgtctgggctatgtctttggttgtccggtgcgttctgtggtgaacgaacgcgacgcagtacgtgttaccgcacgtgacggtcgcgaattcgcagcgaaacgtttggtttgcacgattccgctgaacgtattgagttctgttcattttagcccaccactgtccccgcaacgcatggccgctgcgaacattggccatgttaaccaggctgtcaaagtgcatgcggaagtcagttgtccggatatgcgttcatggtcgggtatctcctatccgttcaacaaattagcctacgctatcggcgatggcacgaccccagcgggtaatacgcatattgtgtgccttgggggggcccataatcatatccagccggaagaggacgtggaagcaacgaagatggccgttgaaaacatgtcgcctgggaatatggatatcaaacgtctggtcttcgggaactggtgcaaggatgaatttgccaaaggcgcgtggttcttcgcccctccacagctgctgtcaaagagcctggatgaactgcgctgccgtcacggtaatgtcctgtttgcaaactccgattgggccttaggttggcgtggttttatcgatggtgctatcgaggagggcacccgcgcagcggttactgtaattgaggaactgcgtcctgcgcctgcggtgcgttcccacctg

SEQ ID NO: 496 - protein, 495 aa, synthetic construct
  REGION 1..495: note = Variant of monoamine oxidase
MTSRDGYQWTPETGLTQGVPSLGVISPPTNIEDTDKDGPWDVIVIGGGYCGLTATRDLTVAGFKTLLLEARDRIGGRSWSSRIDGYGYEMGGTWVHWHQSHVWREITRYKMHNALSKSFNFSRGVNHFQLRTNPTTSTYMTHEAEDELLRSALHKFTNVDGTNGRTVLPFPHDMFYVPEFRKYDEMSYSERIDQIRDELSLNERSSLEAFILLCSGGTLENSSFGEFLHWWAMSGYTYQGCMDCLISYKFKDGQSAFARRFWEEAAGTGRLGYVFGCPVRSVVNERDAVRVTARDGREFAAKRLVCTIPLNVLSSVHFSPPLSPQRMAAANIGHVNQAVKVHAEVSCPDMRSWSGISYPFNKLAYAIGDGTTPAGNTHIVCLGGAHNHIQPEEDVEATKMAVENMSPGNMDIKRLVFGNWCKDEFAKGAWFFAPPQLLSKSLDELRCRHGNVLFANSDWALGWRGFIDGAIEEGTRAAVTVIEELRPAPAVRSHL

SEQ ID NO: 497 - DNA, 1485 bp, synthetic construct
  misc_feature 1..1485: note = Variant of monoamine oxidase
  source 1..1485: mol_type = other DNA
atgaccagccgcgacggctatcagtggaccccggaaacgggtctgacccagggcgtaccgtccctgggtgtcatttcgccgccgactaacatcgaagataccgataaggacgggccttgggatgtcattgtcattgggggcgggtattgtgggctgaccgcaacccgtgatttaaccgtcgcagggttcaagacgctgctgctggaggcccgtgatcgtattggtggccgctcctggagcagtaatattgacggttacccgtatgagatgggtggcacttgggttcattggcatcaaccgcacgtgtggcgtgaaatcacgcgttataaaatgcacaacgcgctgtctccatcatttaacttttcacgtggcgtgaatcacttccaactgcgtaccaatccgaccaccagtacgtacatgacgcacgaagcgtcggctgaactgatgcgtagcgcattgcataaattcaccaatgtcgacggcactaatggccgtacagtgttgccgttcccacatgatatgttttatgtgccggaatttcgcaagtatgacgaaatgtcatattccgaacgcattgaccagatccgcgacgatctgtctttgaacgaacgctctagtttagaggctttcattttattatgtagcggtggcaccctggaaaactccagctttggtgaatttctgcattggtgggcaatgtcgggttacacgtatcagggctgtattgattgtttaatttcctataaagttaagggtggccagagtgcgttcgcgcgtcgcttctgggaagaagccgctggcactggccgtctgggctatgtctttggttgcccggtgcgttctgtggtgaacgaacgcgacgcagtacgtgttaccgcacgtgacggtcgcgaattcgcagcgaaacgtttggtttgcacgattccgctgaacgtattgagttctgttcattttagcccaccactgtccccgcaacgcatggccgctgcgaacattggccatgttaaccagtgcgtcaaagtgcatgcggaagtcagtaacaaggatatgcgttcatggtcgggtatctcctatccgttcaacaaattagcctacgctatcggcgatggcacgaccccagcgggtaatacgcatattgtgtgccttgggggggcccataatcatatccagccggaagaggacgtggaagcaacgaagatggccgttgaaaacatgtcgcctgggaatatggatatcaaacgtctggtcttccacaactggtgcaaggatgaatttgccaaaggcgcgtggttcttcgcccctccacagctgctgtcaaagagcctggatgaactgcgcgcacgtcacggtaatgtcctgtttgcaaactccgattgggccttaggttggcgtggttttatcgatggtgctatcgaggagggcacccgcgcagcggttactgtaattgaggaactgcgtcctgcgcctgcggtgcgttcccacctg

SEQ ID NO: 498 - protein, 495 aa, synthetic construct
  REGION 1..495: note = Variant of monoamine oxidase
MTSRDGYQWTPETGLTQGVPSLGVISPPTNIEDTDKDGPWDVIVIGGGYCGLTATRDLTVAGFKTLLLEARDRIGGRSWSSNIDGYPYEMGGTWVHWHQPHVWREITRYKMHNALSPSFNFSRGVNHFQLRTNPTTSTYMTHEASAELMRSALHKFTNVDGTNGRTVLPFPHDMFYVPEFRKYDEMSYSERIDQIRDDLSLNERSSLEAFILLCSGGTLENSSFGEFLHWWAMSGYTYQGCIDCLISYKVKGGQSAFARRFWEEAAGTGRLGYVFGCPVRSVVNERDAVRVTARDGREFAAKRLVCTIPLNVLSSVHFSPPLSPQRMAAANIGHVNQCVKVHAEVSNKDMRSWSGISYPFNKLAYAIGDGTTPAGNTHIVCLGGAHNHIQPEEDVEATKMAVENMSPGNMDIKRLVFHNWCKDEFAKGAWFFAPPQLLSKSLDELRARHGNVLFANSDWALGWRGFIDGAIEEGTRAAVTVIEELRPAPAVRSHL

SEQ ID NO: 499 - DNA, 1485 bp, synthetic construct
  misc_feature 1..1485: note = Variant of monoamine oxidase
  source 1..1485: mol_type = other DNA
atgaccagccgcgacggctatcagtggaccccggaaacgggtctgacccagggcgtaccgtccctgggtgtcatttcgccgccgactaacatcgaagataccgataaggacgggccttgggatgtcattgtcattgggggcgggtattgtgggctgaccgcaacccgtgatttaaccgtcgcagggttcaagacgctgctgctggaggcccgtgatcgtattggtggccgctcctggagcagtaatattgacggttacggttatgagatgggtggcacttgggttcattggcatcaatctcacgtgtggcgtgaaatcacgcgttataaaatgcacaacgcgctgtctccatcatttaacttttcacgtggcgtgaatcacttccaactgcgtaccaatccgaccaccagtacgtacatgacgcacgaagcggaggatgaactgctgcgtagcgcattgcataaattcaccaatgtcgacggcactaatggccgtacagtgttgccgttcccacatgatatgttttatgtgccggaatttcgcaagtatgacgaaatgtcatattccgaacgcattgaccagatccgcgacgaactgtctttgaacgaacgctctagtttagaggctttcattttattatgtagcggtggcaccctggaaaactccagctttggtgaatttctgcattggtgggcaatgtcgggttacacgtatcagggctgtatggattgtttaatctcctataaatttaaggatggccagagtgcgttcgcgcgtcgcttctgggaagaagccgctggcactggccgtctgggctatgtctttggttgtccggtgcgttctgtggtgaacgaacgcgacgcagtacgtgttaccgcacgtgacggtcgcgaattcgcagcgaaacgtttggtttgcacgattccgctgaacgtattgagttctgttcattttagcccaccactgtccccgcaacgcatggccgctgcgaacattggccatgttaaccagtgcgtcaaagtgcatgcggaagtcagttgtccggatatgcgttcatggtcgggtatctcctatccgttcaacaaattagcctacgctatcggcgatggcacgaccccagcgggtaatacgcatattgtgtgccttgggggggcccataatcatatccagccggaagaggacgtggaagcaacgaagatggccgttgaaaacatgtcgcctgggaatatggatatcaaacgtctggtcttcgggaactggtgcaaggatgaatttgccaaaggcgcgtggttcttcgcccctccacagctgctgtcaaagagcctggatgaactgcgctgccgtcacggtaatgtcctgtttgcaaactccgattgggccttaggttggcgtggttttatcgatggtgctatcgaggagggcacccgcgcagcggttactgtaattgaggaactgcgtcctgcgcctgcggtgcgttcccacctg

SEQ ID NO: 500 - protein, 495 aa, synthetic construct
  REGION 1..495: note = Variant of monoamine oxidase
MTSRDGYQWTPETGLTQGVPSLGVISPPTNIEDTDKDGPWDVIVIGGGYCGLTATRDLTVAGFKTLLLEARDRIGGRSWSSNIDGYGYEMGGTWVHWHQSHVWREITRYKMHNALSPSFNFSRGVNHFQLRTNPTTSTYMTHEAEDELLRSALHKFTNVDGTNGRTVLPFPHDMFYVPEFRKYDEMSYSERIDQIRDELSLNERSSLEAFILLCSGGTLENSSFGEFLHWWAMSGYTYQGCMDCLISYKFKDGQSAFARRFWEEAAGTGRLGYVFGCPVRSVVNERDAVRVTARDGREFAAKRLVCTIPLNVLSSVHFSPPLSPQRMAAANIGHVNQCVKVHAEVSCPDMRSWSGISYPFNKLAYAIGDGTTPAGNTHIVCLGGAHNHIQPEEDVEATKMAVENMSPGNMDIKRLVFGNWCKDEFAKGAWFFAPPQLLSKSLDELRCRHGNVLFANSDWALGWRGFIDGAIEEGTRAAVTVIEELRPAPAVRSHL

SEQ ID NO: 501 - DNA, 1485 bp, synthetic construct
  misc_feature 1..1485: note = Variant of monoamine oxidase
  source 1..1485: mol_type = other DNA
atgaccagccgcgacggctatcagtggaccccggaaacgggtctgacccagggcgtaccgtccctgggtgtcatttcgccgccgactaacatcgaagataccgataaggacgggccttgggatgtcattgtcattgggggcgggtattgtgggctgaccgcaacccgtgatttaaccgtcgcagggttcaagacgctgctgctggaggcccgtgatcgtattggtggccgctccgacgtgagtaatattgacggttacccgtatgagatgggtggcacttgggttcattggcatcaatctcacgtgtggcgtgaaatcacgcgttataaaatgcacaacgcgctgtctccatcatttaacttttcacgtggcgtgaatcacttccaactgcgtaccaatccgaccaccagtacgtacatgacgcacgaagcggaggatgaactgctgcgtagcgcattgcataaattcaccaatgtcgacggcactaatggccgtacagtgttgccgttcccacatgatatgttttatgtgccggaatttcgcaagtatgatgaaatgtcatattccgaacgcattgaccagatccgcgacgaactgtctttgaacgaacgctctagtttagaggctttcattttattatgtagcggtggcaccctggaaaactccagctttggtgaatttctgcattggtgggcaatgtcgggttacacgtatcagggctgtatggattgtttaatctcctataaatttaaggatggccagagtgcgttcgcgcgtcgcttctgggaagaagccgctggcactggccgtctgggctatgtctttggttgtccggtgcgttctgtggtgaacgaacgcgacgcagtacgtgttaccgcacgtgacggtcgcgaattcgcagcgaaacgtttggtttgcacgattccgctgaacgtattgagttctgttcattttagcccaccactgtccccgcaacgcatggccgctgcgaacggcggccatgttaaccagtgcgtcaaagtgcatgcggaagtcagttgtccggatatgcgttcatggtcgggtatctcctatccgttcaacaaattagcctacgctatcggcgatggcacgaccccagcgggtaatacgcatattgtgtgccttgggggggcccataatcatatccagccggaagaggacgtggaagcaacgaagatggccgttgaaaacatgtcgcctgggaatatggatatcaaacgtctggtcttccacaactggtgcaaggatgaatttgccaaaggcgggtggttcttcgcccctccacagctgctgtcaaagagcctggatgaactgcgctgccgtcacggtaatgtcctgtttgcaaactccgattgggccttaggttggcgtggttttatcgatggtgctatcgaggagggcacccgcgcagcggttactgtaattgaggaactgcgtcctgcgcctgcggtgcgttcccacctg

SEQ ID NO: 502 - protein, 495 aa, synthetic construct
  REGION 1..495: note = Variant of monoamine oxidase
MTSRDGYQWTPETGLTQGVPSLGVISPPTNIEDTDKDGPWDVIVIGGGYCGLTATRDLTVAGFKTLLLEARDRIGGRSDVSNIDGYPYEMGGTWVHWHQSHVWREITRYKMHNALSPSFNFSRGVNHFQLRTNPTTSTYMTHEAEDELLRSALHKFTNVDGTNGRTVLPFPHDMFYVPEFRKYDEMSYSERIDQIRDELSLNERSSLEAFILLCSGGTLENSSFGEFLHWWAMSGYTYQGCMDCLISYKFKDGQSAFARRFWEEAAGTGRLGYVFGCPVRSVVNERDAVRVTARDGREFAAKRLVCTIPLNVLSSVHFSPPLSPQRMAAANGGHVNQCVKVHAEVSCPDMRSWSGISYPFNKLAYAIGDGTTPAGNTHIVCLGGAHNHIQPEEDVEATKMAVENMSPGNMDIKRLVFHNWCKDEFAKGGWFFAPPQLLSKSLDELRCRHGNVLFANSDWALGWRGFIDGAIEEGTRAAVTVIEELRPAPAVRSHL

SEQ ID NO: 503 - DNA, 1485 bp, synthetic construct
  misc_feature 1..1485: note = Variant of monoamine oxidase
  source 1..1485: mol_type = other DNA
atgaccagccgcgacggctatcagtggaccccggaaacgggtctgacccagggcgtaccgtccctgggtgtcatttcgccgccgactaacatcgaagataccgataaggacgggccttgggatgtcattgtcattgggggcgggtattgtgggctgaccgcaacccgtgatttaaccgtcgcagggttcaagacgctgctgctggaggcccgtgatcgtattggtggccgctcctggagcagtaacattgacggttacctgtatgagatgggtggcacttgggttcattggcatcaatctcacgtgtggcgtgaaatcacgcgttataaaatgcacaacgcgctgtctccgtcatttaacttttcacgtggcgtgaatcacttccaactgcgtaccaatccgaccaccagtacgtacatgacgcacgaagcggaggatgaactgctgcgtagcgcattgcataaattcaccaatgtcgacggcactaatggccgtacagtgttgccgttcccacatgatatgttttatgtgccggaatttcgcaagtatgacgaaatgtcatattccgaacgcattgaccagatccgcgacgaactgtctttgaacgaacgctctagtttagaggctttcattttattatgtagcggtggcaccctggaaaactccagctttggtgaatttctgcattggtgggcaatgtcgggttacacgtatcagggctgtatggattgtttaatctcctataaatttaaggatggccagagtgcgttcgcgcgtcgcttctgggaagaagccgctggcactggccgtctgggctatgtctttggttgtccggtgcgttctgtggtgaacgaacgcgacgcagtacgtgttaccgcacgtgacggtcgcgaattcgcagcgaaacgtttggtttgcacgattccgctgaacgtattgagttctgttcattttagcccaccactgtccccgcaacgcatggccgctgcgaacattggccatgttaaccagtgcgtcaaagtgcatgcggaagtcagttgtccggatatgcgttcatggtcgggtatctcctatccgttcaacaaattagcctacgctatcggcgatggcacgaccccagcgggtaatacgcatattgtgtgccttgggggggcccataatcatatccagccggaagaggacgtggaagcaacgaagatggccgttgaaaacatgtcgcctgggaatatggatatcaaacgtctggtcttccacaactggtgcaaggatgaatttgccaaaggcgcgtggttcttcgcccctccacagctgctgtcaaagagcctggatgaactgcgctgccgtcacggtaatgtcctgtttgcaaactccgattgggccttaggttggcgtggttttatcgatggtgctatcgaggagggcacccgcgcagcggttactgtaattgaggaactgcgtcctgcgcctgcggtgcgttcccacctg

SEQ ID NO: 504 - protein, 495 aa, synthetic construct; identical to SEQ ID NO: 16
  REGION 1..495: note = Variant of monoamine oxidase

SEQ ID NO: 505 - DNA, 1485 bp, synthetic construct
  misc_feature 1..1485: note = Variant of monoamine oxidase
  source 1..1485: mol_type = other DNA
atgaccagccgcgacggctatcagtggaccccggaaacgggtctgacccagggcgtaccgtccctgggtgtcatttcgccgccgactaacatcgaagataccgataaggacgggccttgggatgtcattgtcattgggggcgggtattgtgggctgaccgcaacccgtgatttaaccgtcgcagggttcaagacgctgctgctggaggcccgtgatcgtattggtggccgctcctggagcagttttattgacggttacctgtatgagatgggtggcacttgggttcattggcatcaatctcacgtgtggcgtgaaatcacgcgttataaaatgcacaacgcgctgtctaaatcatttaacttttcacgtggcgtgaatcacttccaactgcgtaccaatccgaccaccagtacgtacatgacgcacgaagcggaggatgaactgctgcgtagcgcattgcataaattcaccaatgtcgacggcactaatggccgtacagtgttgccgttcccacatgatatgttttatgtgccggaatttcgcaagtatgacgaaatgtcatattccgaacgcattgaccagatccgcgacgaactgtctttgaacgaacgctctagtttagaggctttcattttattatgtagcggtggcaccctggaaaactccagctttggtgaatttctgcattggtgggcaatgtcgggttacacgtatcagggctgtatggattgtttaatctcctataaatttaaggatggccagagtgcgttcgcgcgtcgcttctgggaagaagccgctggcactggccgtctgggctatgtctttggttgtccggtgcgttctgtggtgaacgaacgcgacgcagtacgtgttaccgcacgtgacggtcgcgaattcgcagcgaaacgtttggtttgcacgattccgctgaacgtattgagttctgttcattttagcccaccactgtccccgcaacgcatggccgctgcgaacattggccatgttaaccagtgcgtcaaagtgcatgcggaagtcagttgtccggatatgcgttcatggtcgggtatctcctatccgttcaacaaattagcctacgctatcggcgatggcacgaccccagcgggtaatacgcatattgtgtgccttgggggggcccataatcatatccagccggaagaggacgtggaagcaacgaagatggccgttgaaaacatgtcgcctgggaatatggatatcaaacgtctggtcttccacaactggtgcaaggatgaatttgccaaaggcgcgtggttcttcgcccctccacagctgctgtcaaagagcctggatgaactgcgctgccgtcacggtaatgtcctgtttgcaaactccgattgggccttaggttggcgtggttttatcgatggtgctatcgaggagggcacccgcgcagcggttactgtaattgaggaactgcgtcctgcgcctgcggtgcgttcccacctg

SEQ ID NO: 506 - protein, 495 aa, synthetic construct
  REGION 1..495: note = Variant of monoamine oxidase
MTSRDGYQWTPETGLTQGVPSLGVISPPTNIEDTDKDGPWDVIVIGGGYCGLTATRDLTVAGFKTLLLEARDRIGGRSWSSFIDGYLYEMGGTWVHWHQSHVWREITRYKMHNALSKSFNFSRGVNHFQLRTNPTTSTYMTHEAEDELLRSALHKFTNVDGTNGRTVLPFPHDMFYVPEFRKYDEMSYSERIDQIRDELSLNERSSLEAFILLCSGGTLENSSFGEFLHWWAMSGYTYQGCMDCLISYKFKDGQSAFARRFWEEAAGTGRLGYVFGCPVRSVVNERDAVRVTARDGREFAAKRLVCTIPLNVLSSVHFSPPLSPQRMAAANIGHVNQCVKVHAEVSCPDMRSWSGISYPFNKLAYAIGDGTTPAGNTHIVCLGGAHNHIQPEEDVEATKMAVENMSPGNMDIKRLVFHNWCKDEFAKGAWFFAPPQLLSKSLDELRCRHGNVLFANSDWALGWRGFIDGAIEEGTRAAVTVIEELRPAPAVRSHL

SEQ ID NO: 507 - DNA, 1485 bp, synthetic construct
  misc_feature 1..1485: note = Variant of monoamine oxidase
  source 1..1485: mol_type = other DNA
atgaccagccgcgacggctatcagtggaccccggaaacgggtctgacccagggcgtaccgtccctgggtgtcatttcgccgccgactaacatcgaagataccgataaggacgggccttgggatgtcattgtcattgggggcgggtattgtgggctgaccgcaacccgtgatttaaccgtcgcagggttcaagacgctgctgctggaggcccgtgatcgtattggtggccgctcctggagcagtaatattgacggttacccgtatgagatgggtggcacttgggttcattggcatcaatcgcacgtgtggcgtgaaatcacgcgttataaaatgcacaacgcgctgtctccatcatttaacttttcacgtggcgtgaatcacttccaactgcgtaccaatccgaccaccagtacgtacatgacgcacgaagcgggggatgaactgatgcgtagcgcattgcataaattcaccaatgtcgacggcactaatggccgtacagtgttgccgttcccacatgatatgttttatgtgccggaatttcgcaagtatgacgaaatgtcatattccgaacgcattgaccagatccgcgacgaactgtctttgaacgaacgcactagtttagaggctttcattttattatgtagcggtggcaccctggaaaactccagctttggtgaatttctgcattggtgggcaatgtcgggttacacgtatcagggctgtatggattgtttaatgtcctataaagttaagggtggccagagtgcgttcgcgcgtcgcttctgggaagaagccgctggcactggccgtctgggctatgtctttggttgcccggtgcgttctgtggtgaacgaacgcgacgcagtacgtgttaccgcacgtgacggtcgcgaattcgcagcgaaacgtttggtttgcacgattccgctgaacgtattgagttctgttcattttagcccaccactgtccccgcaacgcatggccgctgcgaacattggccatgttaaccagtgcgtcaaagtgcatgcggaagtcagttgcccagatatgcgttcatggtcgggtatctcctatccgttcaacaaattagcctacgctatcggcgatggcacgaccccagcgggtaatacgcatattgtgtgccttgggggggcccataatcatatccagccggaagaggacgtggaagcaacgaagatggccgttgaaaacatgtcgcctgggaatatggatatcaaacgtctggtcttccacaactggtgcaaggatgaatttgccaaaggcgcgtggttcttcgcccctccacagctgctgtcaaagagcctggatgaactgcgctgtcgtcacggtaatgtcctgtttgcaaactccgattgggccttaggttggcgtggttttatcgatggtgctatcgaggagggcacccgcgcagcggttactgtaattgaggaactgcgtcctgcgcctgcggtgcgttcccacctg

SEQ ID NO: 508 - protein, 495 aa, synthetic construct
  REGION 1..495: note = Variant of monoamine oxidase
MTSRDGYQWTPETGLTQGVPSLGVISPPTNIEDTDKDGPWDVIVIGGGYCGLTATRDLTVAGFKTLLLEARDRIGGRSWSSNIDGYPYEMGGTWVHWHQSHVWREITRYKMHNALSPSFNFSRGVNHFQLRTNPTTSTYMTHEAGDELMRSALHKFTNVDGTNGRTVLPFPHDMFYVPEFRKYDEMSYSERIDQIRDELSLNERTSLEAFILLCSGGTLENSSFGEFLHWWAMSGYTYQGCMDCLMSYKVKGGQSAFARRFWEEAAGTGRLGYVFGCPVRSVVNERDAVRVTARDGREFAAKRLVCTIPLNVLSSVHFSPPLSPQRMAAANIGHVNQCVKVHAEVSCPDMRSWSGISYPFNKLAYAIGDGTTPAGNTHIVCLGGAHNHIQPEEDVEATKMAVENMSPGNMDIKRLVFHNWCKDEFAKGAWFFAPPQLLSKSLDELRCRHGNVLFANSDWALGWRGFIDGAIEEGTRAAVTVIEELRPAPAVRSHL

SEQ ID NO: 509 - DNA, 1485 bp, synthetic construct
  misc_feature 1..1485: note = Variant of monoamine oxidase
  source 1..1485: mol_type = other DNA
atgaccagccgcgacggctatcagtggaccccggaaacgggtctgacccagggcgtaccgtccctgggtgtcatttcgccgccgactaacatcgaagataccgataaggacgggccttgggatgtcattgtcattgggggcgggtattgtgggctgaccgcaacccgtgatttaaccgtcgcagggttcaagacgctgctgctggaggcccgtgatcgtattggtggccgctcctggagcagtcgcattgacggttacccgtatgagatgggtggcacttgggttcattggcatcaatctcacgtgtggcgtgaaatcacgcgttataaaatgcacggcgcgctgtctccgtcatttaacttttcacgtggcgtgaatcacttccaactgcgtaccaatccgaccaccagtacgtacatgacgcacgaagcggaggatgaactgctgcgtagcgcattgcataaattcaccaatgtcgacggcactaatggccgtacagtgttgccgttcccacatgatatgttttatgtgccggaatttcgcaagtatgacgaaatgtcatattccgaacgcattgaccagatccgcgacgaactgtctttgaacgaacgctctagtttagaggctttcattttattatgtagcggtggcacctcggaaaactccagctttggtgaatttctgcattggtgggcaatgtcgggttacacgtatcagggctgtatggattgtttaatctcctataaatttaaggatggccagagtgcgttcgcgcgtcgcttctgggaagaagccgctggcactggccgtctgggctatgtctttggttgtccggtgcgttctgtggtgaacgaacgcgacgcagtacgtgttaccgcacgtgacggtcgcgaattcgcagcgaaacgtttggtttgcacgattccgctgaacgtattgagttctgttcattttagcccaccactgtccccgcaacgcatggccgctgcgaacattggccatgttaaccagagcgtcaaagtgcatgcggaagtcagttgtccggatatgcgttcatggtcgggtatctcctatccgttcaacaaattagcctacgctatcggcgatggcacgaccccagcgggtaatacgcatattgtgtgccttgggggggcccataatcatatccagccggaagaggacgtggaagcaacgaagatggccgttgaaaacatgtcgcctgggaatatggatatcaaacgtctggtcttccacaactggtgcaaggatgaatttgccaaaggcgcgtggttcttcgcccctccacagctgctgtcaaagagcctggatgaactgcgctgccgtcacggtaatgtcctgtttgcaaactccgattgggccttaggttggcgtggttttatcgatggtgctatcgaggagggcacccgcgcagcggttactgtaattgaggaactgcgtcctgcgcctgcggtgcgttcccacctg

SEQ ID NO: 510 - protein, 495 aa, synthetic construct
  REGION 1..495: note = Variant of monoamine oxidase
MTSRDGYQWTPETGLTQGVPSLGVISPPTNIEDTDKDGPWDVIVIGGGYCGLTATRDLTVAGFKTLLLEARDRIGGRSWSSRIDGYPYEMGGTWVHWHQSHVWREITRYKMHGALSPSFNFSRGVNHFQLRTNPTTSTYMTHEAEDELLRSALHKFTNVDGTNGRTVLPFPHDMFYVPEFRKYDEMSYSERIDQIRDELSLNERSSLEAFILLCSGGTSENSSFGEFLHWWAMSGYTYQGCMDCLISYKFKDGQSAFARRFWEEAAGTGRLGYVFGCPVRSVVNERDAVRVTARDGREFAAKRLVCTIPLNVLSSVHFSPPLSPQRMAAANIGHVNQSVKVHAEVSCPDMRSWSGISYPFNKLAYAIGDGTTPAGNTHIVCLGGAHNHIQPEEDVEATKMAVENMSPGNMDIKRLVFHNWCKDEFAKGAWFFAPPQLLSKSLDELRCRHGNVLFANSDWALGWRGFIDGAIEEGTRAAVTVIEELRPAPAVRSHL

SEQ ID NO: 511 - DNA, 1485 bp, synthetic construct
  misc_feature 1..1485: note = Variant of monoamine oxidase
  source 1..1485: mol_type = other DNA
atgaccagccgcgacggctatcagtggaccccggaaacgggtctgacccagggcgtaccgtccctgggtgtcatttcgccgccgactaacatcgaagataccgataaggacgggccttgggatgtcattgtcattgggggcgggtattgtgggctgaccgcaacccgtgatttaaccgtcgcagggttcaagacgctgctgctggaggcccgtgatcgtattggtggccgctcctggagcagtaatattgacggttacccgtatgagatgggtggcacttgggttcattggcatcaatctcacgtgtggcgtgaaatcacgcgttataaaatgcacaacgcgctgtctccatcatttaacttttcacgtggcgtgaatcacttccaactgcgtaccaatccgaccaccagtacgtacatgacgcacgaagcggaggatgaactgctgcgtagcgcattgcataaattcaccaatgtcgacggcactaatggccgtacagtgttgccgttcccacatgatatgttttatgtgccggaatttcgcaagtatgacgaaatgtcatattccgaacgcattgaccagatccgcgacgaactgtctttgaacgaacgctctagtttagaggctttcattttattatgtagcggtggcaccctggaaaactccagctttggtgaatttctgcattggtgggcaatgtcgggttacacgtatcagggctgtatggattgtttaatctcctataaatttaaggatggccagagtgcgttcgcgcgtcgcttctgggaagaagccgctggcactggccgtctgggctatgtctttggttgtccggtgcgttctgtggtgaacgaacgcgacgcagtacgtgttaccgcacgtgacggtcgcgaattcgcagcgaaacgtttggtttgcacgattccgctgaacgtattgagttctgttcattttagcccaccactgtccccgcaacgcatggccgctgcgaacattggccatgttaaccagtgcgtcaaagtgcatgcggaagtcagttgtccggatatgcgttcatggtcgggtatctcctatccgttcaacaaattagcctacgctatcggcgatggcacgaccccagcgggtaatacgcatattgtgtgccttgggggggccgagaatcatatccagccggaagaggacgtggaagcaacgaagatggccgttgaaaacatgtcgcctgggaatatggatatcaaacgtctggtcttccacaactggtgcaaggatgaatttgccaaaggcgggtggttcttcgcccctccacagctgctgtcaaagagcctggatgaactgcgctgccgtcacggtaatgtcctgtttgcaaactccgattgggccttaggttggcgtggttttatcgatggtgctatcgaggagggcacccgcgcagcggttactgtaattgaggaactgcgtcctgcgcctgcggtgcgttcccacctg

SEQ ID NO: 512 - protein, 495 aa, synthetic construct
  REGION 1..495: note = Variant of monoamine oxidase
MTSRDGYQWTPETGLTQGVPSLGVISPPTNIEDTDKDGPWDVIVIGGGYCGLTATRDLTVAGFKTLLLEARDRIGGRSWSSNIDGYPYEMGGTWVHWHQSHVWREITRYKMHNALSPSFNFSRGVNHFQLRTNPTTSTYMTHEAEDELLRSALHKFTNVDGTNGRTVLPFPHDMFYVPEFRKYDEMSYSERIDQIRDELSLNERSSLEAFILLCSGGTLENSSFGEFLHWWAMSGYTYQGCMDCLISYKFKDGQSAFARRFWEEAAGTGRLGYVFGCPVRSVVNERDAVRVTARDGREFAAKRLVCTIPLNVLSSVHFSPPLSPQRMAAANIGHVNQCVKVHAEVSCPDMRSWSGISYPFNKLAYAIGDGTTPAGNTHIVCLGGAENHIQPEEDVEATKMAVENMSPGNMDIKRLVFHNWCKDEFAKGGWFFAPPQLLSKSLDELRCRHGNVLFANSDWALGWRGFIDGAIEEGTRAAVTVIEELRPAPAVRSHL

SEQ ID NO: 513 - DNA, 1485 bp, synthetic construct
  misc_feature 1..1485: note = Variant of monoamine oxidase
  source 1..1485: mol_type = other DNA
atgaccagccgcgacggctatcagtggaccccggaaacgggtctgacccagggcgtaccgtccctgggtgtcatttcgccgccgactaacatcgaagataccgataaggacgggccttgggatgtcattgtcattgggggcgggtattgtgggctgaccgcaacccgtgatttaaccgtcgcagggttcaagacgctgctgctggaggcccgtgatcgtattggtggccgctcctggagcagtcgcattgacggttacctgtatgagatgggtggcacttgggttcattggcatcaatctcacgtgtggcgtgaaatcacgcgttataaaatgcacaacgcgctgtctccatcatttaacttttcacgtggcgtgaatcacttccaactgcgtaccaatccgaccaccagtacgtacatgacgcacgaagcggaggatgaactgctgcgtagcgcattgcataaattcaccaatgtcgacggcactaatggccgtacagtgttgccgttcccacatgatatgttttatgtgccggaatttcgcaagtatgacgaaatgtcatattccgaacgcattgaccagatccgcgacgaactgtctttgaacgaacgctctagtttagaggctttcattttattatgtagcggtggcggctcggaaaactccagctttggtgaatttctgcattggtgggcaatgtcgggttacacgtatcagggctgtatggattgtttaatctcctataaatttaaggatggccagagtgcgttcgcgcgtcgcttctgggaagaagccgctggcactggccgtctgggctatgtctttggttgtccggtgcgttctgtggtgaacgaacgcgacgcagtacgtgttaccgcacgtgacggtcgcgaattcgcagcgaaacgtttggtttgcacgattccgctgaacgtattgagttctgttcattttagcccaccactgtccccgcaacgcatggccgctgcgaacattggccatgttaaccagagcgtcaaagtgcatgcggaagtcagttgtccggatatgcgttcatggtcgggtatctcctatccgttcaacaaattagcctacgctatcggcgatggcacgaccccagcgggtaatacgcatattgtgtgccttgggggggcccataatcatatccagccggaagaggacgtggaagcaacgaagatggccgttgaaaacatgtcgcctgggaatatggatatcaaacgtctggtcttccataactggtgcaaggatgaatttgccaaaggcgcgtggttcttcgcccctccacagctgctgtcaaagagcctggatgaactgcgctgccgtcacggtaatgtcctgtttgcaaactccgattgggccttaggttggcgtggttttatcgatggtgctatcgaggagggcacccgcgcagcggttactgtaattgaggaactgcgtcctgcgcctgcggtgcgttcccacctg

SEQ ID NO: 514 - protein, 495 aa, synthetic construct
  REGION 1..495: note = Variant of monoamine oxidase
MTSRDGYQWTPETGLTQGVPSLGVISPPTNIEDTDKDGPWDVIVIGGGYCGLTATRDLTVAGFKTLLLEARDRIGGRSWSSRIDGYLYEMGGTWVHWHQSHVWREITRYKMHNALSPSFNFSRGVNHFQLRTNPTTSTYMTHEAEDELLRSALHKFTNVDGTNGRTVLPFPHDMFYVPEFRKYDEMSYSERIDQIRDELSLNERSSLEAFILLCSGGGSENSSFGEFLHWWAMSGYTYQGCMDCLISYKFKDGQSAFARRFWEEAAGTGRLGYVFGCPVRSVVNERDAVRVTARDGREFAAKRLVCTIPLNVLSSVHFSPPLSPQRMAAANIGHVNQSVKVHAEVSCPDMRSWSGISYPFNKLAYAIGDGTTPAGNTHIVCLGGAHNHIQPEEDVEATKMAVENMSPGNMDIKRLVFHNWCKDEFAKGAWFFAPPQLLSKSLDELRCRHGNVLFANSDWALGWRGFIDGAIEEGTRAAVTVIEELRPAPAVRSHL

SEQ ID NO: 515 - DNA, 1485 bp, synthetic construct
  misc_feature 1..1485: note = Variant of monoamine oxidase
  source 1..1485: mol_type = other DNA
atgaccagccgcgacggctatcagtggaccccggaaacgggtctgacccagggcgtaccgtccctgggtgtcatttcgccgccgactaacatcgaagataccgataaggacgggccttgggatgtcattgtcattgggggcgggtattgtgggctgaccgcaacccgtgatttaaccgtcgcagggttcaagacgctgctgctggaggcccgtgatcgtattggtggccgctcctggagcagtaatattgacggttacccgtatgagatgggtggcacttgggttcattggcatcaatctcacgtgtggcgtgaaatcacgcgttataaaatgcacaacgcgctgtctccatcatttaacttttcacgtggcgtgaatcacttccaactgcgtaccaatccgaccaccagtacgtacatgacgcacgaagcggaggatgaactgctgcgtagcgcattgcataaattcaccaatgtcgacggcactaatggccgtacagtgttgccgttcccacatgatatgttttatgtgccggaatttcgcaagtatgatgaaatgtcatattccgaacgcattgaccagatccgcgacgaactgtctttgaacgaacgctctagtttagaggctttcattttattatgtagcggtggcaccctggaaaactccagctttggtgaatttctgcattggtgggcaatgtcgggttacacgtaccagggctgtttggattgtttaatctcctataaatttaaggatggccagagtgcgttcgcgcgtcgcttctgggaagaagccgctggcactggccgtctgggctatgtctttggttgtccggtgcgttctgtggtggatgaacgcgacgcagtacgtgttaccgcacgtgacggtcgcgaattcgcagcgaaacgtttggtttgcacgattccgctgaacgtattgagttctgttcattttagcccaccactgtccccgcaacgcatggccgctgcgaacatcggccatgttaaccagtgcgtcaaagtgcatgcggaagtcagttgtccggatatgcgttcatggtcgggtatctcctatccgttcaacaaattagcctacgctatcggcgatggcacgaccccagcgggtaatacgcatattgtggcgcttgggggggcccataatcatatccagccggaagaggacgtggaagcaacgaagatggccgttgaaaacatgtcgcctgggaatatggatatcaaacgtctggtcttccacaactggtgcaaggatgaatttgccaaaggcgggtggttcttcgcccctccacagctgctgtcaaagagcctggatgaactgcgctgccgtcacggtaatgtcctgtttgcaaactccgattgggccttaggttggcgtggttttatcgatggtgctatcgaggagggcacccgcgcagcggttactgtaattgaggaactgcgtcctgcgcctgcggtgcgttcccacctg

SEQ ID NO: 516 - protein, 495 aa, synthetic construct
  REGION 1..495: note = Variant of monoamine oxidase
MTSRDGYQWTPETGLTQGVPSLGVISPPTNIEDTDKDGPWDVIVIGGGYCGLTATRDLTVAGFKTLLLEARDRIGGRSWSSNIDGYPYEMGGTWVHWHQSHVWREITRYKMHNALSPSFNFSRGVNHFQLRTNPTTSTYMTHEAEDELLRSALHKFTNVDGTNGRTVLPFPHDMFYVPEFRKYDEMSYSERIDQIRDELSLNERSSLEAFILLCSGGTLENSSFGEFLHWWAMSGYTYQGCLDCLISYKFKDGQSAFARRFWEEAAGTGRLGYVFGCPVRSVVDERDAVRVTARDGREFAAKRLVCTIPLNVLSSVHFSPPLSPQRMAAANIGHVNQCVKVHAEVSCPDMRSWSGISYPFNKLAYAIGDGTTPAGNTHIVALGGAHNHIQPEEDVEATKMAVENMSPGNMDIKRLVFHNWCKDEFAKGGWFFAPPQLLSKSLDELRCRHGNVLFANSDWALGWRGFIDGAIEEGTRAAVTVIEELRPAPAVRSHL

SEQ ID NO: 517 - DNA, 1485 bp, synthetic construct
  misc_feature 1..1485: note = Variant of monoamine oxidase
  source 1..1485: mol_type = other DNA
atgaccagccgcgacggctatcagtggaccccggaaacgggtctgacccagggcgtaccgtccctgggtgtcatttcgccgccgactaacatcgaagataccgataaggacgggccttgggatgtcattgtcattgggggcgggtattgtgggctgaccgcaacccgtgatttaaccgtcgcagggttcaagacgctgctgctggaggcccgtgatcgtattggtggccgctcctggagcagttttattgacggttacccgtatgagatgggtggcacttgggttcattggcatcaatctcacgtgtggcgtgaaatcacgcgttataaaatgcacaacgcgctgtctccatcatttaacttttcacgtggcgtgaatcacttccaactgcgtaccaatccgaccaccagtacgtacatgacgcacgaagcggaggatgaactgctgcgtagcgcattgcataaattcaccaatgtcgacggcactaatggccgtacagtgttgccgttcccacatgatatgttttatgtgccggaatttcgcaagtatgacgaaatgtcatattccgaacgcattgaccagatccgcgacgaactgtctttgaacgaacgctctagtttagaggctttcattttattatgtagcggtggcaccctggaaaactccagctttggtgaatttctgcattggtgggcaatgtcgggttacacgtatcagggctgtatggattgtttaatctcctataaatttaaggatggccagagtgcgttcgcgcgtcgcttctgggaagaagccgctggcactggccgtctgggctatgtctttggttgtccggtgcgttctgtggtgaacgaacgcgacgcagtacgtgttaccgcacgtgacggtcgcgaattcgcagcgaaacgtttggtttgcacgattccgctgaacgtattgagttctgttcattttagcccaccactgtccccgcaacgcatggccgctgcgaacattggccatgttaaccagtgcgtcaaagtgcatgcggaagtcagttgtccggatatgcgttcatggtcgggtatctcctatccgttcaacaaattagcctacgctatcggcgatggcacgaccccagcgggtaatacgcatattgtgtgccttgggggggcccataatcatatccagccggaagaggacgtggaagcaacgaagatggccgttgaaaacatgtcgcctgggaatatggatatcaaacgtctggtcttcgggaactggtgcaaggatgaatttgccaaaggcgcgtggttcttcgcccctccacagctgctgtcaaagagcctggatgaactgcgctgccgtcacggtaatgtcctgtttgcaaactccgattgggccttaggttggcgtggttttatcgatggtgctatcgaggagggcacccgcgcagcggttactgtaattgaggaactgcgtcctgcgcctgcggtgcgttcccacctg

SEQ ID NO: 518 - protein, 495 aa, synthetic construct
  REGION 1..495: note = Variant of monoamine oxidase
MTSRDGYQWTPETGLTQGVPSLGVISPPTNIEDTDKDGPWDVIVIGGGYCGLTATRDLTVAGFKTLLLEARDRIGGRSWSSFIDGYPYEMGGTWVHWHQSHVWREITRYKMHNALSPSFNFSRGVNHFQLRTNPTTSTYMTHEAEDELLRSALHKFTNVDGTNGRTVLPFPHDMFYVPEFRKYDEMSYSERIDQIRDELSLNERSSLEAFILLCSGGTLENSSFGEFLHWWAMSGYTYQGCMDCLISYKFKDGQSAFARRFWEEAAGTGRLGYVFGCPVRSVVNERDAVRVTARDGREFAAKRLVCTIPLNVLSSVHFSPPLSPQRMAAANIGHVNQCVKVHAEVSCPDMRSWSGISYPFNKLAYAIGDGTTPAGNTHIVCLGGAHNHIQPEEDVEATKMAVENMSPGNMDIKRLVFGNWCKDEFAKGAWFFAPPQLLSKSLDELRCRHGNVLFANSDWALGWRGFIDGAIEEGTRAAVTVIEELRPAPAVRSHL

SEQ ID NO: 519 - DNA, 1485 bp, synthetic construct
  misc_feature 1..1485: note = Variant of monoamine oxidase
  source 1..1485: mol_type = other DNA
atgaccagccgcgacggctatcagtggaccccggaaacgggtctgacccagggcgtaccgtccctgggtgtcatttcgccgccgactaacatcgaagataccgataaggacgggccttgggatgtcattgtcattgggggcgggtattgtgggctgaccgcaacccgtgatttaaccgtcgcagggttcaagacgctgctgctggaggcccgtgatcgtattggtggccgctccgacagcagtaatattgacggttacccgtatgagatgggtggcacttgggttcattggcatcaatctcacgtgtggcgtgaaatcacgcgttataaaatgcacaacgcgctgtctccatcatttaacttttcacgtggcgtgaatcacttccaactgcgtaccaatccgaccaccagtacgtacatgacgcacgaagcggaggatgaactgctgcgtagcgcattgcataaattcaccaatgtcgacggcactaatggccgtacagtgttgccgttcccacatgatatgttttatgtgccggaatttcgcaagtatgacgaaatgtcatattccgaacgcattgaccagatccgcgacgaactgtctttgaacgaacgctctagtttagaggctttcattttattatgtagcggtggcaccctggaaaactccagctttggtgaatttctgcattggtgggcaatgtcgggttacacgtatcagggctgtatggattgtttaatctcctataaatttaaggatggccagagtgcgttcgcgcgtcgcttctgggaagaagccgctggcactggccgtctgggctatgtctttggttgtccggtgcgttctgtggtgaacgaacgcgacgcagtacgtgttaccgcacgtgacggtcgcgaattcgcagcgaaacgtttggtttgcacgattccgctgaacgtattgagttctgttcattttagcccaccactgtccccgcaacgcatggccgctgcgaacatcggccatgttaaccagtgcgtcaaagtgcatgcggaagtcagttgtccggatatgcgttcatggtcgggtatctcctatccgttcaacaaattagcctacgctatcggcgatggcacgaccccagcgggtaatacgcatattgtgtgccttgggggggcccataatcatatccagccggaagaggacgtggaagcaacgaagatggccgttgaaaacatgtcgcctgggaatatggatatcaaacgtctggtcttccacaactggtgcaaggatgaatttgccaaaggcgcgtggttcttcgcccctccacagctgctgtcaaagagcctggatgaactgcgctgccgtcacggtaatgtcctgtttgcaaactccgattgggccttaggttggcgtggttttatcgatggtgctatcgaggagggcacccgcgcagcggttactgtaattgaggaactgcgtcctgcgcctgcggtgcgttcccacctg

SEQ ID NO: 520 - protein, 495 aa, synthetic construct; identical to SEQ ID NO: 8
  REGION 1..495: note = Variant of monoamine oxidase

SEQ ID NO: 521 - DNA, 1485 bp, synthetic construct
  misc_feature 1..1485: note = Variant of monoamine oxidase
  source 1..1485: mol_type = other DNA
atgaccagccgcgacggctatcagtggaccccggaaacgggtctgacccagggcgtaccgtccctgggtgtcatttcgccgccgactaacatcgaagataccgataaggacgggccttgggatgtcattgtcattgggggcgggtattgtgggctgaccgcaacccgtgatttaaccgtcgcagggttcaagacgctgctgctggaggcccgtgatcgtattggtggccgctcctggagcagtaatattgacggttacccgtatgagatgggtggcacttgggttcattggcatcaatctcacgtgtggcgtgaaatcacgcgttataaaatgcacaacgcgctgtctccatcatttaacttttcacgtggcgtgaatcacttccaactgcgtaccaatccgaccaccagtacgtacatgacgcacgaagcggaggatgaactgctgcgtagcgcattgcataaattcaccaatgtcgacggcactaatggccgtacagtgttgccgttcccacatgatatgttttatgtgccggaatttcgcaagtatcgcgaaatgtcatattccgaacgcattgaccagatccgcgacgaactgtctttgaacgaacgctctagtttagaggctttcattttattatgtagcggtggcaccctggaaaactccagctttggtgaatttctgcattggtgggcaatgtcgggttacacgtaccagggctgtatggattgtttaatctcctataaatttaaggatggccagagtgcgttcgcgcgtcgcttctgggaagaagccgctggcactggccgtctgggctatgtctttggttgtccggtgcgttctgtggtggatgaacgcgacgcagtacgtgttaccgcacgtgacggtcgcgaattcgcagcgaaacgtttggtttgcacgattccgctgaacgtattgagttctgttcattttagcccaccactgtccccgcaacgcatggccgctgcgaacattggccatgttaaccagtgcgtcaaagtgcatgcggaagtcagttgtccggatatgcgttcatggtcgggtatctcctatccgttcaacaaattagcctacgctatcggcgatggcacgaccccagcgggtaatacgcatattgtgtgccttgggggggcccataatcatatccagccggaagaggacgtggaagcaacgaagatggccgttgaaaacatgtcgcctgggaatatggatatcaaacgtctggtcttccacaactggtgcaaggatgaatttgccaaaggcgggtggttcttcgcccctccacagctgctgtcaaagagcctggatgaactgcgctgccgtcacggtaatgtcctgtttgcaaactccgattgggccttaggttggcgtggttttatcgatggtgctatcgaggagggcacccgcgcagcggttactgtaattgaggaactgcgtcctgcgcctgcggtgcgttcccacctg

SEQ ID NO: 522 - protein, 495 aa, synthetic construct
  REGION 1..495: note = Variant of monoamine oxidase
MTSRDGYQWTPETGLTQGVPSLGVISPPTNIEDTDKDGPWDVIVIGGGYCGLTATRDLTVAGFKTLLLEARDRIGGRSWSSNIDGYPYEMGGTWVHWHQSHVWREITRYKMHNALSPSFNFSRGVNHFQLRTNPTTSTYMTHEAEDELLRSALHKFTNVDGTNGRTVLPFPHDMFYVPEFRKYREMSYSERIDQIRDELSLNERSSLEAFILLCSGGTLENSSFGEFLHWWAMSGYTYQGCMDCLISYKFKDGQSAFARRFWEEAAGTGRLGYVFGCPVRSVVDERDAVRVTARDGREFAAKRLVCTIPLNVLSSVHFSPPLSPQRMAAANIGHVNQCVKVHAEVSCPDMRSWSGISYPFNKLAYAIGDGTTPAGNTHIVCLGGAHNHIQPEEDVEATKMAVENMSPGNMDIKRLVFHNWCKDEFAKGGWFFAPPQLLSKSLDELRCRHGNVLFANSDWALGWRGFIDGAIEEGTRAAVTVIEELRPAPAVRSHL

SEQ ID NO: 523 - DNA, 1485 bp, synthetic construct
  misc_feature 1..1485: note = Variant of monoamine oxidase
  source 1..1485: mol_type = other DNA
atgaccagccgcgacggctatcagtggaccccggaaacgggtctgacccagggcgtaccgtccctgggtgtcatttcgccgccgactaacatcgaagataccgataaggacgggccttgggatgtcattgtcattgggggcgggtattgtgggctgaccgcaacccgtgatttaaccgtcgcagggttcaagacgctgctgctggaggcccgtgatcgtattggtggccgctcctggagcagtaatattgacggttacccgtatgagatgggtggcacttgggttcattggcatcaatcgcacgtgtggcgtgaaatcacgcgttataaaatgcacaacgcgctgtctccatcatttaacttttcacgtggcgtgaatcacttccaactgcgtaccaatccgaccaccagtacgtacatgacgcacgaagcgggggatgaactgctgcgtagcgcattgcataaattcaccaatgtcgacggcactaatggccgtacagtgttgccgttcccacatgatatgttttatgtgccggaatttcgcaagtatgacgaaatgtcatattccgaacgcattgaccagatccgcgacgaactgtctttgaacgaacgctctagtttagaggctttcattttattatgtagcggtggcaccctggaaaactccagctttggtgaatttctgcattggtgggcaatgtcgggttacacgtatcagggctgtatggattgtttaatctcctataaagttaagggtggccagagtgcgttcgcgcgtcgcttctgggaagaagccgctggcactggccgtctgggctatgtctttggttgtccggtgcgttctgtggtgaacgaacgcgacgcagtacgtgttaccgcacgtgacggtcgcgaattcgcagcgaaacgtttggtttgcacgattccgctgaacgtattgagttctgttcattttagcccaccactgtccccgcaacgcatggccgctgcgaacattggccatgttaaccagtgcgtcaaagtgcatgcggaagtcagttgcaaggatatgcgttcatggtcgggtatctcctatccgttcaacaaattagcctacgctatcggcgatggcacgaccccagcgggtaatacgcatattgtgtgccttgggggggcccataatcatatccagccggaagaggacgtggaagcaacgaagatggccgttgaaaacatgtcgcctgggaatatggatatcaaacgtctggtcttccacaactggtgcaaggatgaatttgccaaaggcgcgtggttcttcgcccctccacagctgctgtcaaagagcctggatgaactgcgctgtcgtcacggtaatgtcctgtttgcaaactccgattgggccttaggttggcgtggttttatcgatggtgctatcgaggagggcacccgcgcagcggttactgtaattgaggaactgcgtcctgcgcctgcggtgcgttcccacctg

SEQ ID NO: 524 - protein, 495 aa, synthetic construct
  REGION 1..495: note = Variant of monoamine oxidase
MTSRDGYQWTPETGLTQGVPSLGVISPPTNIEDTDKDGPWDVIVIGGGYCGLTATRDLTVAGFKTLLLEARDRIGGRSWSSNIDGYPYEMGGTWVHWHQSHVWREITRYKMHNALSPSFNFSRGVNHFQLRTNPTTSTYMTHEAGDELLRSALHKFTNVDGTNGRTVLPFPHDMFYVPEFRKYDEMSYSERIDQIRDELSLNERSSLEAFILLCSGGTLENSSFGEFLHWWAMSGYTYQGCMDCLISYKVKGGQSAFARRFWEEAAGTGRLGYVFGCPVRSVVNERDAVRVTARDGREFAAKRLVCTIPLNVLSSVHFSPPLSPQRMAAANIGHVNQCVKVHAEVSCKDMRSWSGISYPFNKLAYAIGDGTTPAGNTHIVCLGGAHNHIQPEEDVEATKMAVENMSPGNMDIKRLVFHNWCKDEFAKGAWFFAPPQLLSKSLDELRCRHGNVLFANSDWALGWRGFIDGAIEEGTRAAVTVIEELRPAPAVRSHL

SEQ ID NO: 525 - DNA, 1485 bp, synthetic construct
  misc_feature 1..1485: note = Variant of monoamine oxidase
  source 1..1485: mol_type = other DNA
atgaccagccgcgacggctatcagtggaccccggaaacgggtctgacccagggcgtaccgtccctgggtgtcatttcgccgccgactaacatcgaagataccgataaggacgggccttgggatgtcattgtcattgggggcgggtattgtgggctgaccgcaacccgtgatttaaccgtcgcagggttcaagacgctgctgctggaggcccgtgatcgtattggtggccgctcctggagcagttttattgacggttacggttatgagatgggtggcacttgggttcattggcatcaatctcacgtgtggcgtgaaatcacgcgttataaaatgcacaacgcgctgtctccatcatttaacttttcacgtggcgtgaatcacttccaactgcgtaccaatccgaccaccagtacgtacatgacgcacgaagcggaggatgaactgctgcgtagcgcattgcataaattcaccaatgtcgacggcactaatggccgtacagtgttgccgttcccacatgatatgttttatgtgccggaatttcgcaagtatgacgaaatgtcatattccgaacgcattgaccagatccgcgacgaactgtctttgaacgaacgctctagtttagaggctttcattttattatgtagcggtggcggcctggaaaactccagctttggtgaatttctgcattggtgggcaatgtcgggttacacgtatcagggctgtatggattgtttaatctcctataaatttaaggatggccagagtgcgttcgcgcgtcgcttctgggaagaagccgctggcactggccgtctgggctatgtctttggttgtccggtgcgttctgtggtgaacgaacgcgacgcagtacgtgttaccgcacgtgacggtcgcgaattcgcagcgaaacgtttggtttgcacgattccgctgaacgtattgagttctgttcattttagcccaccactgtccccgcaacgcatggccgctgcgaacattggccatgttaaccagtgcgtcaaagtgcatgcggaagtcagttgtccggatatgcgttcatggtcgggtatctcctatccgttcaacaaattagcctacgctatcggcgatggcacgaccccagcgggtaatacgcatattgtgtgccttgggggggcccataatcatatccagccggaagaggacgtggaagcaacgaagatggccgttgaaaacatgtcgcctgggaatatggatatcaaacgtctggtcttccataactggtgcaaggatgaatttgccaaaggcgcgtggttcttcgcccctccacagctgctgtcaaagagcctggatgaactgcgctgccgtcacggtaatgtcctgtttgcaaactccgattgggccttaggttggcgtggttttatcgatggtgctatcgaggagggcacccgcgcagcggttactgtaattgaggaactgcgtcctgcgcctgcggtgcgttcccacctg

SEQ ID NO: 526 - protein, 495 aa, synthetic construct
  REGION 1..495: note = Variant of monoamine oxidase
MTSRDGYQWTPETGLTQGVPSLGVISPPTNIEDTDKDGPWDVIVIGGGYCGLTATRDLTVAGFKTLLLEARDRIGGRSWSSFIDGYGYEMGGTWVHWHQSHVWREITRYKMHNALSPSFNFSRGVNHFQLRTNPTTSTYMTHEAEDELLRSALHKFTNVDGTNGRTVLPFPHDMFYVPEFRKYDEMSYSERIDQIRDELSLNERSSLEAFILLCSGGGLENSSFGEFLHWWAMSGYTYQGCMDCLISYKFKDGQSAFARRFWEEAAGTGRLGYVFGCPVRSVVNERDAVRVTARDGREFAAKRLVCTIPLNVLSSVHFSPPLSPQRMAAANIGHVNQCVKVHAEVSCPDMRSWSGISYPFNKLAYAIGDGTTPAGNTHIVCLGGAHNHIQPEEDVEATKMAVENMSPGNMDIKRLVFHNWCKDEFAKGAWFFAPPQLLSKSLDELRCRHGNVLFANSDWALGWRGFIDGAIEEGTRAAVTVIEELRPAPAVRSHL

SEQ ID NO: 527 - DNA, 1485 bp, synthetic construct
  misc_feature 1..1485: note = Variant of monoamine oxidase
  source 1..1485: mol_type = other DNA
atgaccagccgcgacggctatcagtggaccccggaaacgggtctgacccagggcgtaccgtccctgggtgtcatttcgccgccgactaacatcgaagataccgataaggacgggccttgggatgtcattgtcattgggggcgggtattgtgggctgaccgcaacccgtgatttaaccgtcgcagggttcaagacgctgctgctggaggcccgtgatcgtattggtggccgctcctggagcagtaacattgacggttacggttatgagatgggtggcacttgggttcattggcatcaatctcacgtgtggcgtgaaatcacgcgttataaaatgcacggcgcgctgtctaaatcatttaacttttcacgtggcgtgaatcacttccaactgcgtaccaatccgaccaccagtacgtacatgacgcacgaagcggaggatgaactgctgcgtagcgcattgcataaattcaccaatgtcgacggcactaatggccgtacagtgttgccgttcccacatgatatgttttatgtgccggaatttcgcaagtatgacgaaatgtcatattccgaacgcattgaccagatccgcgacgaactgtctttgaacgaacgctctagtttagaggctttcattttattatgtagcggtggcaccctggaaaactccagctttggtgaatttctgcattggtgggcaatgtcgggttacacgtatcagggctgtatggattgtttaatctcctataaatttaaggatggccagagtgcgttcgcgcgtcgcttctgggaagaagccgctggcactggccgtctgggctatgtctttggttgtccggtgcgttctgtggtgaacgaacgcgacgcagtacgtgttaccgcacgtgacggtcgcgaattcgcagcgaaacgtttggtttgcacgattccgctgaacgtattgagttctgttcattttagcccaccactgtccccgcaacgcatggccgctgcgaacattggccatgttaaccagtgcgtcaaagtgcatgcggaagtcagttgtccggatatgcgttcatggtcgggtatctcctatccgttcaacaaattagcctacgctatcggcgatggcacgaccccagcgggtaatacgcatattgtgtgccttgggggggcccataatcatatccagccggaagaggacgtggaagcaacgaagatggccgttgaaaacatgtcgcctgggaatatggatatcaaacgtctggtcttcgggaactggagcaaggatgaatttgccaaaggcgcgtggttcttcgcccctccacagctgctgtcaaagagcctggatgaactgcgctgccgtcacggtaatgtcctgtttgcaaactccgattgggccttaggttggcgtggttttatcgatggtgctatcgaggagggcacccgcgcagcggttactgtaattgaggaactgcgtcctgcgcctgcggtgcgttcccacctg

SEQ ID NO: 528 - protein, 495 aa, synthetic construct
  REGION 1..495: note = Variant of monoamine oxidase
MTSRDGYQWTPETGLTQGVPSLGVISPPTNIEDTDKDGPWDVIVIGGGYCGLTATRDLTVAGFKTLLLEARDRIGGRSWSSNIDGYGYEMGGTWVHWHQSHVWREITRYKMHGALSKSFNFSRGVNHFQLRTNPTTSTYMTHEAEDELLRSALHKFTNVDGTNGRTVLPFPHDMFYVPEFRKYDEMSYSERIDQIRDELSLNERSSLEAFILLCSGGTLENSSFGEFLHWWAMSGYTYQGCMDCLISYKFKDGQSAFARRFWEEAAGTGRLGYVFGCPVRSVVNERDAVRVTARDGREFAAKRLVCTIPLNVLSSVHFSPPLSPQRMAAANIGHVNQCVKVHAEVSCPDMRSWSGISYPFNKLAYAIGDGTTPAGNTHIVCLGGAHNHIQPEEDVEATKMAVENMSPGNMDIKRLVFGNWSKDEFAKGAWFFAPPQLLSKSLDELRCRHGNVLFANSDWALGWRGFIDGAIEEGTRAAVTVIEELRPAPAVRSHL

SEQ ID NO: 529 - DNA, 1485 bp, synthetic construct
  misc_feature 1..1485: note = Variant of monoamine oxidase
  source 1..1485: mol_type = other DNA
atgaccagccgcgacggctatcagtggaccccggaaacgggtctgacccagggcgtaccgtccctgggtgtcatttcgccgccgactaacatcgaagataccgataaggacgggccttgggatgtcattgtcattgggggcgggtattgtgggctgaccgcaacccgtgatttaaccgtcgcagggttcaagacgctgctgctggaggcccgtgatcgtattggtggccgctcctggagcagtaatattgacggttacccgtatgagatgggtggcacttgggttcattggcatcaatctcacgtgtggcgtgaaatcacgcgttataaaatgcacaacgcgctgtctccatcatttaacttttcacgtggcgtgaatcacttccaactgcgtaccaatccgaccaccagtacgtacatgacgcacgaagcggaggatgaactgctgcgtagcgcattgcataaattcaccaatgtcgacggcactaatggccgtacagtgttgccgttcccacatgatatgttttatgtgccggaatttcgcaagtatgacgaaatgtcatattccgaacgcattgaccagatccgcgacgaactgtctttgaacgaacgctctagtttagaggctttcattttattatgtagcggtggcaccctggaaaactccagctttggtgaatttctgcattggtgggcaatgtcgggttacacgcgtcagggctgtatggattgtttaatctcctataaatttaaggatggccagagtgcgttcgcgcgtcgcttctgggaagaagccgctggcactggccgtctgggctatgtctttggttgtccggtgcgttctgtggtgaacgaacgcgacgcagtacgtgttaccgcacgtgacggtcgcgaattcgcagcgaaacgtttggtttgcacgattccgctgaacgtattgagttctgttcattttagcccaccactgtccccgcaacgcatggccgctgcgaacattggccatgttaaccagtgcgtcaaagtgcatgcggaagtcagttgtccggatatgcgttcatggtcgggtatctcctatccgttcaacaaattagcctacgctatcggcgatggcacgaccccagcgggtaatacgcatattgtgtgccttgggggggcccataatcatatccagccggaagaggacgtggaagcaacgaagatggccgttgaaaacatgtcgcctgggaatatggatatcaaacgtctggtcttccacaactggtgcaaggatgaatttgccaaaggcgggtggttcttcgcccctccacagctgctgtcaaagagcctggatgaactgcgctgccgtcacggtaatgtcctgtttgcaaactccgattgggccttaggttggcgtggttttatcgatggtgctatcgaggagggcacccgcgcagcggttactgtaattgaggaactgcgtcctgcgcctgcggtgcgttcccacctg

SEQ ID NO: 530 - protein, 495 aa, synthetic construct
  REGION 1..495: note = Variant of monoamine oxidase
MTSRDGYQWTPETGLTQGVPSLGVISPPTNIEDTDKDGPWDVIVIGGGYCGLTATRDLTVAGFKTLLLEARDRIGGRSWSSNIDGYPYEMGGTWVHWHQSHVWREITRYKMHNALSPSFNFSRGVNHFQLRTNPTTSTYMTHEAEDELLRSALHKFTNVDGTNGRTVLPFPHDMFYVPEFRKYDEMSYSERIDQIRDELSLNERSSLEAFILLCSGGTLENSSFGEFLHWWAMSGYTRQGCMDCLISYKFKDGQSAFARRFWEEAAGTGRLGYVFGCPVRSVVNERDAVRVTARDGREFAAKRLVCTIPLNVLSSVHFSPPLSPQRMAAANIGHVNQCVKVHAEVSCPDMRSWSGISYPFNKLAYAIGDGTTPAGNTHIVCLGGAHNHIQPEEDVEATKMAVENMSPGNMDIKRLVFHNWCKDEFAKGGWFFAPPQLLSKSLDELRCRHGNVLFANSDWALGWRGFIDGAIEEGTRAAVTVIEELRPAPAVRSHL

SEQ ID NO: 531 - DNA, 1485 bp, synthetic construct
  misc_feature 1..1485: note = Variant of monoamine oxidase
  source 1..1485: mol_type = other DNA
atgaccagccgcgacggctatcagtggaccccggaaacgggtctgacccagggcgtaccgtccctgggtgtcatttcgccgccgactaacatcgaagataccgataaggacgggccttgggatgtcattgtcattgggggcgggtattgtgggctgaccgcaacccgtgatttaaccgtcgcagggttcaagacgctgctgctggaggcccgtgatcgtattggtggccgctcctggagcagtaatattgacggttacccgtatgagatgggtggcacttgggttcattggcatcaaccgcacgtgtggcgtgaaatcacgcgttataaaatgcacaacgcgctgtctccatcatttaacttttcacgtggcgtgaatcacttccaactgcgtaccaatccgaccaccagtacgtacatgacgcacgaagcggaggctgaactgctgcgtagcgcattgcataaattcaccaatgtcgacggcactaatggccgtacagtgttgccgttcccacatgatatgttttatgtgccggaatttcgcaagtatgacgaaatgtcatattccgaacgcattgaccagatccgcgacgaactgtctttgaacgaacgctctagtttagaggctttcattttattatgtagcggtggcaccctggaaaactccagctttggtgaatttctgcattggtgggcaatgtcgggttacacgtatcagggctgtatggattgtttaatctcctataaagttaaggatggccagagtgcgttcgcgcgtcgcttctgggaagaagccgctggcactggccgtctgggctatgtctttggttgcccggtgcgttctgtggtgaacgaacgcgacgcagtacgtgttaccgcacgtgacggtcgcgaattcgcagcgaaacgtttggtttgcacgattccgctgaacgtattgagttctgttcattttagcccaccactgtccccgcaacgcatggccgctgcgaacattggccatgttaaccagtgcgtcaaagtgcatgcggaagtcagttgcccagatatgcgttcatggtcgggtatctcctatccgttcaacaaattagcctacgctatcggcgatggcacgaccccagcgggtaatacgcatattgtgtgccttgggggggcccataatcatatccagccggaagaggacgtggaagcaacgaagatggccgttgaaaacatgtcgcctgggaatatggatatcaaacgtctggtcttccacaactggtgcaaggatgaatttgccaaaggcgcgtggttcttcgcccctccacagctgctgtcaaagagcctggatgaactgcgcgcacgtcacggtaatgtcctgtttgcaaactccgattgggccttaggttggcgtggttttatcgatggtgctatcgaggagggcacccgcgcagcggttactgtaattgaggaactgcgtcctgcgcctgcggtgcgttcccacctg

SEQ ID NO: 532 - protein, 495 aa, synthetic construct
  REGION 1..495: note = Variant of monoamine oxidase
MTSRDGYQWTPETGLTQGVPSLGVISPPTNIEDTDKDGPWDVIVIGGGYCGLTATRDLTVAGFKTLLLEARDRIGGRSWSSNIDGYPYEMGGTWVHWHQPHVWREITRYKMHNALSPSFNFSRGVNHFQLRTNPTTSTYMTHEAEAELLRSALHKFTNVDGTNGRTVLPFPHDMFYVPEFRKYDEMSYSERIDQIRDELSLNERSSLEAFILLCSGGTLENSSFGEFLHWWAMSGYTYQGCMDCLISYKVKDGQSAFARRFWEEAAGTGRLGYVFGCPVRSVVNERDAVRVTARDGREFAAKRLVCTIPLNVLSSVHFSPPLSPQRMAAANIGHVNQCVKVHAEVSCPDMRSWSGISYPFNKLAYAIGDGTTPAGNTHIVCLGGAHNHIQPEEDVEATKMAVENMSPGNMDIKRLVFHNWCKDEFAKGAWFFAPPQLLSKSLDELRARHGNVLFANSDWALGWRGFIDGAIEEGTRAAVTVIEELRPAPAVRSHL

SEQ ID NO: 533 - DNA, 1485 bp, synthetic construct
  misc_feature 1..1485: note = Variant of monoamine oxidase
  source 1..1485: mol_type = other DNA
atgaccagccgcgacggctatcagtggaccccggaaacgggtctgacccagggcgtaccgtccctgggtgtcatttcgccgccgactaacatcgaagataccgataaggacgggccttgggatgtcattgtcattgggggcgggtattgtgggctgaccgcaacccgtgatttaaccgtcgcagggttcaagacgctgctgctggaggcccgtgatcgtattggtggccgctcctggagcagtaacattgacggttacctgtatgagatgggtggcacttgggttcattggcatcaatctcacgtgtggcgtgaaatcacgcgttataaaatgcacaacgcgctgtctccatcatttaacttttcacgtggcgtgaatcacttccaactgcgtaccaatccgaccaccagtacgtacatgacgcacgaagcggaggatgaactgctgcgtagcgcattgcataaattcaccaatgtcgacggcactaatggccgtacagtgttgccgttcccacatgatatgttttatgtgccggaatttcgcaagtatgacgaaatgtcatattccgaacgcattgaccagatccgcgacgaactgtctttgaacgaacgctctagtttagaggctttcattttattatgtagcggtggcacctcggaaaactccagctttggtgaatttctgcattggtgggcaatgtcgggttacacgtatcagggctgtatggattgtttaatctcctataaatttaaggatggccagagtgcgttcgcgcgtcgcttctgggaagaagccgctggcactggccgtctgggctatgtctttggttgtccggtgcgttctgtggtgaacgaacgcgacgcagtacgtgttaccgcacgtgacggtcgcgaattcgcagcgaaacgtttggtttgcacgattccgctgaacgtattgagttctgttcattttagcccaccactgtccccgcaacgcatggccgctgcgaacattggccatgttaaccagtgcgtcaaagtgcatgcggaagtcagttgtccggatatgcgttcatggtcgggtatctcctatccgttcaacaaattagcctacgctatcggcgatggcacgaccccagcgggtaatacgcatattgtgtgccttgggggggcccataatcatatccagccggaagaggacgtggaagcaacgaagatggccgttgaaaacatgtcgcctgggaatatggatatcaaacgtctggtcttccacaactggtgcaaggatgaatttgccaaaggcgcgtggttcttcgcccctccacagctgctgtcaaagagcctggatgaactgcgctgccgtcacggtaatgtcctgtttgcaaactccgattgggccttaggttggcgtggttttatcgatggtgctatcgaggagggcacccgcgcagcggttactgtaattgaggaactgcgtcctgcgcctgcggtgcgttcccacctg

SEQ ID NO: 534 - protein, 495 aa, synthetic construct
  REGION 1..495: note = Variant of monoamine oxidase
MTSRDGYQWTPETGLTQGVPSLGVISPPTNIEDTDKDGPWDVIVIGGGYCGLTATRDLTVAGFKTLLLEARDRIGGRSWSSNIDGYLYEMGGTWVHWHQSHVWREITRYKMHNALSPSFNFSRGVNHFQLRTNPTTSTYMTHEAEDELLRSALHKFTNVDGTNGRTVLPFPHDMFYVPEFRKYDEMSYSERIDQIRDELSLNERSSLEAFILLCSGGTSENSSFGEFLHWWAMSGYTYQGCMDCLISYKFKDGQSAFARRFWEEAAGTGRLGYVFGCPVRSVVNERDAVRVTARDGREFAAKRLVCTIPLNVLSSVHFSPPLSPQRMAAANIGHVNQCVKVHAEVSCPDMRSWSGISYPFNKLAYAIGDGTTPAGNTHIVCLGGAHNHIQPEEDVEATKMAVENMSPGNMDIKRLVFHNWCKDEFAKGAWFFAPPQLLSKSLDELRCRHGNVLFANSDWALGWRGFIDGAIEEGTRAAVTVIEELRPAPAVRSHL

SEQ ID NO: 535 - DNA, 1485 bp, synthetic construct
  misc_feature 1..1485: note = Variant of monoamine oxidase
  source 1..1485: mol_type = other DNA
atgaccagccgcgacggctatcagtggaccccggaaacgggtctgacccagggcgtaccgtccctgggtgtcatttcgccgccgactaacatcgaagataccgataaggacgggccttgggatgtcattgtcattgggggcgggtattgtgggctgaccgcaacccgtgatttaaccgtcgcagggttcaagacgctgctgctggaggcccgtgatcgtattggtggccgctcctggagcagtaatattgacggttacccgtatgagatgggtggcacttgggttcattggcatcaatcgcacgtgtggcgtgaaatcacgcgttataaaatgcacaacgcgctgtctccatcatttaacttttcacgtggcgtgaatcacttccaactgcgtaccaatccgaccaccagtacgtacatgacgcacgaagcgtcggatgaactgctgcgtagcgcattgcataaattcaccaatgtcgacggcactaatggccgtacagtgttgccgttcccacatgatatgttttatgtgccggaatttcgcaagtatgacgaaatgtcatattccgaacgcattgaccagatccgcgacgaactgtctttgaacgaacgctctagtttagaggctttcattttattatgtagcggtggcaccctggaaaactccagctttggtgaatttctgcattggtgggcaatgtcgggttacacgtatcagggctgtatggattgtttaatttcctataaatttaagggtggccagagtgcgttcgcgcgtcgcttctgggaagaagccgctggcactggccgtctgggctatgtctttggttgtccggtgcgttctgtggtgaacgaacgcgacgcagtacgtgttaccgcacgtgacggtcgcgaattcgcagcgaaacgtttggtttgcacgattccgctgaacgtattgagttctgttcattttagcccaccactgtccccgcaacgcatggccgctgcgaacattggccatgttaaccagtgcgtcaaagtgcatgcggaagtcagttgcaaggatatgcgttcatggtcgggtatctcctatccgttcaacaaattagcctacgctatcggcgatggcacgaccccagcgggtaatacgcatattgtgtgccttgggggggcccataatcatatccagccggaagaggacgtggaagcaacgaagatggccgttgaaaacatgtcgcctgggaatatggatatcaaacgtctggtcttccacaactggtgcaaggatgaatttgccaaaggcgcgtggttcttcgcccctccacagctgctgtcaaagagcctggatgaactgcgcgcacgtcacggtaatgtcctgtttgcaaactccgattgggccttaggttggcgtggttttatcgatggtgctatcgaggagggcacccgcgcagcggttactgtaattgaggaactgcgtcctgcgcctgcggtgcgttcccacctg

SEQ ID NO: 536 - protein, 495 aa, synthetic construct
  REGION 1..495: note = Variant of monoamine oxidase
MTSRDGYQWTPETGLTQGVPSLGVISPPTNIEDTDKDGPWDVIVIGGGYCGLTATRDLTVAGFKTLLLEARDRIGGRSWSSNIDGYPYEMGGTWVHWHQSHVWREITRYKMHNALSPSFNFSRGVNHFQLRTNPTTSTYMTHEASDELLRSALHKFTNVDGTNGRTVLPFPHDMFYVPEFRKYDEMSYSERIDQIRDELSLNERSSLEAFILLCSGGTLENSSFGEFLHWWAMSGYTYQGCMDCLISYKFKGGQSAFARRFWEEAAGTGRLGYVFGCPVRSVVNERDAVRVTARDGREFAAKRLVCTIPLNVLSSVHFSPPLSPQRMAAANIGHVNQCVKVHAEVSCKDMRSWSGISYPFNKLAYAIGDGTTPAGNTHIVCLGGAHNHIQPEEDVEATKMAVENMSPGNMDIKRLVFHNWCKDEFAKGAWFFAPPQLLSKSLDELRARHGNVLFANSDWALGWRGFIDGAIEEGTRAAVTVIEELRPAPAVRSHL

SEQ ID NO: 537 - DNA, 1485 bp, synthetic construct
  misc_feature 1..1485: note = Variant of monoamine oxidase
  source 1..1485: mol_type = other DNA
atgaccagccgcgacggctatcagtggaccccggaaacgggtctgacccagggcgtaccgtccctgggtgtcatttcgccgccgactaacatcgaagataccgataaggacgggccttgggatgtcattgtcattgggggcgggtattgtgggctgaccgcaacccgtgatttaaccgtcgcagggttcaagacgctgctgctggaggcccgtgatcgtattggtggccgctcctggagcagtaatattgacggttacccgtatgagatgggtggcacttgggttcattggcatcaatctcacgtgtggcgtgaaatcacgcgttataaaatgcacaacgcgctgtctccatcatttaacttttcacgtggcgtgaatcacttccaactgcgtaccaatccgaccaccagtacgtacatgacgcacgaagcggaggatgaactgctgcgtagcgcattgcataaattcaccaatgtcgacggcactaatggccgtacagtgttgccgttcccacatgatatgttttatgtgccggaatttcgcaagtatgacgaaatgtcatattccgaacgcattgaccagatccgcgacgaactgtctttgaacgaacgctctagtttagaggctttcattttattatgtagcggtggcggcctggaaaactccagctttggtgaatttctgcattggtgggcaatgtcgggttacacgtatcagggctgtatggattgtttaatctcctataaatttaaggatggccagagtgcgttcgcgcgtcgcttctgggaagaagccgctggcactggccgtctgggctatgtctttggttgtccggtgcgttctgtggtgaacgaacgcgacgcagtacgtgttaccgcacgtgacggtcgcgaattcgcagcgaaacgtttggtttgcacgattccgctgaacgtattgagttctgttcattttagcccaccactgtccccgcaacgcatggccgctgcgaacattggccatgttaaccagtgcgtcaaagtgcatgcggaagtcagttgtccggatatgcgttcatggtcgggtatctcctatccgttcaacaaattagcctacgctatcggcgatggcacgaccccagcgggtaatacgcatattgtgtgccttgggggggcccataatcatatccagccggaagaggacgtggaagcaacgaagatggccgttgaaaacatgtcgcctgggaatatggatatcaaacgtctggtcttccacaactggtgcaaggatgaatttgccaaaggcgcgtggttcttcgcccctccacagctgctgtcaaagagcctggatgaactgcgctgccgtcacggtaatgtcctgtttgcaaactccgattgggccttaggttggcgtggttttatcgatggtgctatcgaggagggcacccgcgcagcggttactgtaattgaggaactgcgtcctgcgcctgcggtgcgttcccacctg

SEQ ID NO: 538 - protein, 495 aa, synthetic construct; identical to SEQ ID NO: 102
  REGION 1..495: note = Variant of monoamine oxidase

SEQ ID NO: 539 - DNA, 1485 bp, synthetic construct
  misc_feature 1..1485: note = Variant of monoamine oxidase
  source 1..1485: mol_type = other DNA
atgaccagccgcgacggctatcagtggaccccggaaacgggtctgacccagggcgtaccgtccctgggtgtcatttcgccgccgactaacatcgaagataccgataaggacgggccttgggatgtcattgtcattgggggcgggtattgtgggctgaccgcaacccgtgatttaaccgtcgcagggttcaagacgctgctgctggaggcccgtgatcgtattggtggccgctcctggagcagtaacattgacggttacctgtatgagatgggtggcacttgggttcattggcatcaatctcacgtgtggcgtgaaatcacgcgttataaaatgcacaacgcgctgtctccatcatttaacttttcacgtggcgtgaatcacttccaactgcgtaccaatccgaccaccagtacgtacatgacgcacgaagcggaggatgaactgctgcgtagcgcattgcataaattcaccaatgtcgacggcactaatggccgtacagtgttgccgttcccacatgatatgttttatgtgccggaatttcgcaagtatgacgaaatgtcatattccgaacgcattgaccagatccgcgacgaactgtctttgaacgaacgctctagtttagaggctttcattttattatgtagcggtggcacctcggaaaactccagctttggtgaatttctgcattggtgggcaatgtcgggttacacgtatcagggctgtatggattgtttaatctcctataaatttaaggatggccagagtgcgttcgcgcgtcgcttctgggaagaagccgctggcactggccgtctgggctatgtctttggttgtccggtgcgttctgtggtgaacgaacgcgacgcagtacgtgttaccgcacgtgacggtcgcgaattcgcagcgaaacgtttggtttgcacgattccgctgaacgtattgagttctgttcattttagcccaccactgtccccgcaacgcatggccgctgcgaacattggccatgttaaccagtgcgtcaaagtgcatgcggaagtcagttgtccggatatgcgttcatggtcgggtatctcctatccgttcaacaaattagcctacgctatcggcgatggcacgaccccagcgggtaatacgcatattgtgtgccttgggggggcccataatcatatccagccggaagaggacgtggaagcaacgaagatggccgttgaaaacatgtcgcctgggaatatggatatcaaacgtctggtcttcgggaactggtgcaaggatgaatttgccaaaggcgcgtggttcttcgcccctccacagctgctgtcaaagagcctggatgaactgcgctgccgtcacggtaatgtcctgtttgcaaactccgattgggccttaggttggcgtggttttatcgatggtgctatcgaggagggcacccgcgcagcggttactgtaattgaggaactgcgtcctgcgcctgcggtgcgttcccacctg

SEQ ID NO: 540 - protein, 495 aa, synthetic construct
  REGION 1..495: note = Variant of monoamine oxidase
MTSRDGYQWTPETGLTQGVPSLGVISPPTNIEDTDKDGPWDVIVIGGGYCGLTATRDLTVAGFKTLLLEARDRIGGRSWSSNIDGYLYEMGGTWVHWHQSHVWREITRYKMHNALSPSFNFSRGVNHFQLRTNPTTSTYMTHEAEDELLRSALHKFTNVDGTNGRTVLPFPHDMFYVPEFRKYDEMSYSERIDQIRDELSLNERSSLEAFILLCSGGTSENSSFGEFLHWWAMSGYTYQGCMDCLISYKFKDGQSAFARRFWEEAAGTGRLGYVFGCPVRSVVNERDAVRVTARDGREFAAKRLVCTIPLNVLSSVHFSPPLSPQRMAAANIGHVNQCVKVHAEVSCPDMRSWSGISYPFNKLAYAIGDGTTPAGNTHIVCLGGAHNHIQPEEDVEATKMAVENMSPGNMDIKRLVFGNWCKDEFAKGAWFFAPPQLLSKSLDELRCRHGNVLFANSDWALGWRGFIDGAIEEGTRAAVTVIEELRPAPAVRSHL

SEQ ID NO: 541 - DNA, 1485 bp, synthetic construct
  misc_feature 1..1485: note = Variant of monoamine oxidase
  source 1..1485: mol_type = other DNA
atgaccagccgcgacggctatcagtggaccccggaaacgggtctgacccagggcgtaccgtccctgggtgtcatttcgccgccgactaacatcgaagataccgataaggacgggccttgggatgtcattgtcattgggggcgggtattgtgggctgaccgcaacccgtgatttaaccgtcgcagggttcaagacgctgctgctggaggcccgtgatcgtattggtggccgctcctggagcagtcgcattgacggttacggttatgagatgggtggcacttgggttcattggcatcaatctcacgtgtggcgtgaaatcacgcgttataaaatgcacaacgcgctgtctaaatcatttaacttttcacgtggcgtgaatcacttccaactgcgtaccaatccgaccaccagtacgtacatgacgcacgaagcggaggatgaactgctgcgtagcgcattgcataaattcaccaatgtcgacggcactaatggccgtacagtgttgccgttcccacatgatatgttttatgtgccggaatttcgcaagtatgacgaaatgtcatattccgaacgcattgaccagatccgcgacgaactgtctttgaacgaacgctctagtttagaggctttcattttattatgtagcggtggcggcctggaaaactccagctttggtgaatttctgcattggtgggcaatgtcgggttacacgtatcagggctgtatggattgtttaatctcctataaatttaaggatggccagagtgcgttcgcgcgtcgcttctgggaagaagccgctggcactggccgtctgggctatgtctttggttgtccggtgcgttctgtggtgaacgaacgcgacgcagtacgtgttaccgcacgtgacggtcgcgaattcgcagcgaaacgtttggtttgcacgattccgctgaacgtattgagttctgttcattttagcccaccactgtccccgcaacgcatggccgctgcgaacattggccatgttaaccagtgcgtcaaagtgcatgcggaagtcagttgtccggatatgcgttcatggtcgggtatctcctatccgttcaacaaattagcctacgctatcggcgatggcacgaccccagcgggtaatacgcatattgtgtgccttgggggggcccataatcatatccagccggaagaggacgtggaagcaacgaagatggccgttgaaaacatgtcgcctgggaatatggatatcaaacgtctggtcttccataactggagcaaggatgaatttgccaaaggcgcgtggttcttcgcccctccacagctgctgtcaaagagcctggatgaactgcgctgccgtcacggtaatgtcctgtttgcaaactccgattgggccttaggttggcgtggttttatcgatggtgctatcgaggagggcacccgcgcagcggttactgtaattgaggaactgcgtcctgcgcctgcggtgcgttcccacctg

SEQ ID NO: 542 - protein, 495 aa, synthetic construct
  REGION 1..495: note = Variant of monoamine oxidase
MTSRDGYQWTPETGLTQGVPSLGVISPPTNIEDTDKDGPWDVIVIGGGYCGLTATRDLTVAGFKTLLLEARDRIGGRSWSSRIDGYGYEMGGTWVHWHQSHVWREITRYKMHNALSKSFNFSRGVNHFQLRTNPTTSTYMTHEAEDELLRSALHKFTNVDGTNGRTVLPFPHDMFYVPEFRKYDEMSYSERIDQIRDELSLNERSSLEAFILLCSGGGLENSSFGEFLHWWAMSGYTYQGCMDCLISYKFKDGQSAFARRFWEEAAGTGRLGYVFGCPVRSVVNERDAVRVTARDGREFAAKRLVCTIPLNVLSSVHFSPPLSPQRMAAANIGHVNQCVKVHAEVSCPDMRSWSGISYPFNKLAYAIGDGTTPAGNTHIVCLGGAHNHIQPEEDVEATKMAVENMSPGNMDIKRLVFHNWSKDEFAKGAWFFAPPQLLSKSLDELRCRHGNVLFANSDWALGWRGFIDGAIEEGTRAAVTVIEELRPAPAVRSHL

SEQ ID NO: 543 - DNA, 1485 bp, synthetic construct
  misc_feature 1..1485: note = Variant of monoamine oxidase
  source 1..1485: mol_type = other DNA
atgaccagccgcgacggctatcagtggaccccggaaacgggtctgacccagggcgtaccgtccctgggtgtcatttcgccgccgactaacatcgaagataccgataaggacgggccttgggatgtcattgtcattgggggcgggtattgtgggctgaccgcaacccgtgatttaaccgtcgcagggttcaagacgctgctgctggaggcccgtgatcgtattggtggccgctcctggagcagtaacattgacggttacggttatgagatgggtggcacttgggttcattggcatcaatctcacgtgtggcgtgaaatcacgcgttataaaatgcacggcgcgctgtctccgtcatttaacttttcacgtggcgtgaatcacttccaactgcgtaccaatccgaccaccagtacgtacatgacgcacgaagcggaggatgaactgctgcgtagcgcattgcataaattcaccaatgtcgacggcactaatggccgtacagtgttgccgttcccacatgatatgttttatgtgccggaatttcgcaagtatgacgaaatgtcatattccgaacgcattgaccagatccgcgacgaactgtctttgaacgaacgctctagtttagaggctttcattttattatgtagcggtggcaccctggaaaactccagctttggtgaatttctgcattggtgggcaatgtcgggttacacgtatcagggctgtatggattgtttaatctcctataaatttaaggatggccagagtgcgttcgcgcgtagcttctgggaagaagccgctggcactggccgtctgggctatgtctttggttgtccggtgcgttctgtggtgaacgaacgcgacgcagtacgtgttaccgcacgtgacggtcgcgaattcgcagcgaaacgtttggtttgcacgattccgctgaacgtattgagttctgttcattttagcccaccactgtccccgcaacgcatggccgctgcgaacattggccatgttaaccagtgcgtcaaagtgcatgcggaagtcagttgtccggatatgcgttcatggtcgggtatctcctatccgttcaacaaattagcctacgctatcggcgatggcacgaccccagcgggtaatacgcatattgtgtgccttgggggggcccataatcatatccagccggaagaggacgtggaagcaacgaagatggccgttgaaaacatgtcgcctgggaatatggatatcaaacgtctggtcttccataactggtgcaaggatgaatttgccaaaggcgcgtggttcttcgcccctccacagctgctgtcaaagagcctggatgaactgcgctgccgtcacggtaatgtcctgtttgcaaactccgattgggccttaggttggcgtggttttatcgatggtgctatcgaggagggcacccgcgcagcggttactgtaattgaggaactgcgtcctgcgcctgcggtgcgttcccacctg

SEQ ID NO: 544 - protein, 495 aa, synthetic construct
  REGION 1..495: note = Variant of monoamine oxidase
MTSRDGYQWTPETGLTQGVPSLGVISPPTNIEDTDKDGPWDVIVIGGGYCGLTATRDLTVAGFKTLLLEARDRIGGRSWSSNIDGYGYEMGGTWVHWHQSHVWREITRYKMHGALSPSFNFSRGVNHFQLRTNPTTSTYMTHEAEDELLRSALHKFTNVDGTNGRTVLPFPHDMFYVPEFRKYDEMSYSERIDQIRDELSLNERSSLEAFILLCSGGTLENSSFGEFLHWWAMSGYTYQGCMDCLISYKFKDGQSAFARSFWEEAAGTGRLGYVFGCPVRSVVNERDAVRVTARDGREFAAKRLVCTIPLNVLSSVHFSPPLSPQRMAAANIGHVNQCVKVHAEVSCPDMRSWSGISYPFNKLAYAIGDGTTPAGNTHIVCLGGAHNHIQPEEDVEATKMAVENMSPGNMDIKRLVFHNWCKDEFAKGAWFFAPPQLLSKSLDELRCRHGNVLFANSDWALGWRGFIDGAIEEGTRAAVTVIEELRPAPAVRSHL

SEQ ID NO: 545 - DNA, 1485 bp, synthetic construct
  misc_feature 1..1485: note = Variant of monoamine oxidase
  source 1..1485: mol_type = other DNA
atgaccagccgcgacggctatcagtggaccccggaaacgggtctgacccagggcgtaccgtccctgggtgtcatttcgccgccgactaacatcgaagataccgataaggacgggccttgggatgtcattgtcattgggggcgggtattgtgggctgaccgcaacccgtgatttaaccgtcgcagggttcaagacgctgctgctggaggcccgtgatcgtattggtggccgctcctggagcagtaatattgacggttacccgtatgagatgggtggcacttgggttcattggcatcaaccgcacgtgtggcgtgaaatcacgcgttataaaatgcacaacgcgctgtctccatcatttaacttttcacgtggcgtgaatcacttccaactgcgtaccaatccgaccaccagtacgtacatgacgcacgaagcggaggctgaactgatgcgtagcgcattgcataaattcaccaatgtcgacggcactaatggccgtacagtgttgccgttcccacatgatatgttttatgtgccggaatttcgcaagtatgacgaaatgtcatattccgaacgcattgaccagatccgcgacgatctgtctttgaacgaacgctctagtttagaggctttcattttattatgtagcggtggcaccctggaaaactccagctttggtgaatttctgcattggtgggcaatgtcgggttacacgtatcagggctgtattgattgtttaatgtcctataaatttaaggatggccagagtgcgttcgcgcgtcgcttctgggaagaagccgctggcactggccgtctgggctatgtctttggtactccggtgcgttctgtggtgaacgaacgcgacgcagtacgtgttaccgcacgtgacggtcgcgaattcgcagcgaaacgtttggtttgcacgattccgctgaacgtattgagttctgttcattttagcccaccactgtccccgcaacgcatggccgctgcgaacattggccatgttaaccagtgcgtcaaagtgcatgcggaagtcagtgacaaggatatgcgttcatggtcgggtatctcctatccgttcaacaaattagcctacgctatcggcgatggcacgaccccagcgggtaatacgcatattgtgtgccttgggggggcccataatcatatccagccggaagaggacgtggaagcaacgaagatggccgttgaaaacatgtcgcctgggaatatggatatcaaacgtctggtcttccacaactggtgcaaggatgaatttgccaaaggcgcgtggttcttcgcccctccacagctgctgtcaaagagcctggatgaacgtcgcgcacgtcacggtaatgtcctgtttgcaaactccgattgggccttaggttggcgtggttttatcgatggtgctatcgaggagggcacccgcgcagcggttactgtaattgaggaactgcgtcctgcgcctgcggtgcgttcccacctg

SEQ ID NO: 546 - protein, 495 aa, synthetic construct
  REGION 1..495: note = Variant of monoamine oxidase
MTSRDGYQWTPETGLTQGVPSLGVISPPTNIEDTDKDGPWDVIVIGGGYCGLTATRDLTVAGFKTLLLEARDRIGGRSWSSNIDGYPYEMGGTWVHWHQPHVWREITRYKMHNALSPSFNFSRGVNHFQLRTNPTTSTYMTHEAEAELMRSALHKFTNVDGTNGRTVLPFPHDMFYVPEFRKYDEMSYSERIDQIRDDLSLNERSSLEAFILLCSGGTLENSSFGEFLHWWAMSGYTYQGCIDCLMSYKFKDGQSAFARRFWEEAAGTGRLGYVFGTPVRSVVNERDAVRVTARDGREFAAKRLVCTIPLNVLSSVHFSPPLSPQRMAAANIGHVNQCVKVHAEVSDKDMRSWSGISYPFNKLAYAIGDGTTPAGNTHIVCLGGAHNHIQPEEDVEATKMAVENMSPGNMDIKRLVFHNWCKDEFAKGAWFFAPPQLLSKSLDERRARHGNVLFANSDWALGWRGFIDGAIEEGTRAAVTVIEELRPAPAVRSHL

SEQ ID NO: 547 - DNA, 1485 bp, synthetic construct
  misc_feature 1..1485: note = Variant of monoamine oxidase
  source 1..1485: mol_type = other DNA
atgaccagccgcgacggctatcagtggaccccggaaacgggtctgacccagggcgtaccgtccctgggtgtcatttcgccgccgactaacatcgaagataccgataaggacgggccttgggatgtcattgtcattgggggcgggtattgtgggctgaccgcaacccgtgatttaaccgtcgcagggttcaagacgctgctgctggaggcccgtgatcgtattggtggccgctcctggagcagtaatattgacggttacccgtatgagatgggtggcacttgggttcattggcatcaatctcacgtgtggcgtgaaatcacgcgttataaaatgcacaacgcgctgtctccatcatttaacttttcacgtggcgtgaatcacttccaactgcgtaccaatccgaccaccagtacgtacatgacgcacgaagcggaggatgaactgctgcgtagcgcattgcataaattcaccaatgtcgacggcactaatggccgtacagtgttgccgttcccacatgatatgttttatgtgccggaatttcgcaagtatgacgaaatgtcatattccgaacgcattgaccagatccgcgacgaactgtctttgaacgaacgctctagtttagaggctttcattttattatgtagcggtggcaccctggaaaactccagctttggtgaatttctgcattggtgggcaatgtcgggttacacgtaccagggctgtatggattgtttaatctcctataaatttaaggatggccagagtgcgttcgcgcgtcgcttctgggaagaagccgctggcactggccgtctgggctatgtctttggttgtccggtgcgttctgtggtgaacgaacgcgacgcagtacgtgttaccgcacgtgacggtcgcgaattcgcagcgaaacgtttggtttgcacgattccgctgaacgtattgagttctgttcattttagcccaccactgtccccgcaacgcatggccgctgcgaacggcggccatgttaaccagtgcgtcaaagtgcatgcggaagtcagttgtccggatatgcgttcatggtcgggtatctcctatccgttcaacaaattagcctacgctatcggcgatggcacgaccccagcgggtaatacgcatattgtgtgccttgggggggccgagaatcatatccagccggaagaggacgtggaagcaacgaagatggccgttgaaaacatgtcgcctgggaatatggatatcaaacgtctggtcttccacaactggtgcaaggatgaatttgccaaaggcgcgtggttcttcgcccctccacagctgctgtcaaagagcctggatgaactgcgctgccgtcacggtaatgtcctgtttgcaaactccgattgggccttaggttggcgtggttttatcgatggtgctatcgaggagggcacccgcgcagcggttactgtaattgaggaactgcgtcctgcgcctgcggtgcgttcccacctg

SEQ ID NO: 548 - protein, 495 aa, synthetic construct
  REGION 1..495: note = Variant of monoamine oxidase
MTSRDGYQWTPETGLTQGVPSLGVISPPTNIEDTDKDGPWDVIVIGGGYCGLTATRDLTVAGFKTLLLEARDRIGGRSWSSNIDGYPYEMGGTWVHWHQSHVWREITRYKMHNALSPSFNFSRGVNHFQLRTNPTTSTYMTHEAEDELLRSALHKFTNVDGTNGRTVLPFPHDMFYVPEFRKYDEMSYSERIDQIRDELSLNERSSLEAFILLCSGGTLENSSFGEFLHWWAMSGYTYQGCMDCLISYKFKDGQSAFARRFWEEAAGTGRLGYVFGCPVRSVVNERDAVRVTARDGREFAAKRLVCTIPLNVLSSVHFSPPLSPQRMAAANGGHVNQCVKVHAEVSCPDMRSWSGISYPFNKLAYAIGDGTTPAGNTHIVCLGGAENHIQPEEDVEATKMAVENMSPGNMDIKRLVFHNWCKDEFAKGAWFFAPPQLLSKSLDELRCRHGNVLFANSDWALGWRGFIDGAIEEGTRAAVTVIEELRPAPAVRSHL

SEQ ID NO: 549 - DNA, 1485 bp, synthetic construct
  misc_feature 1..1485: note = Variant of monoamine oxidase
  source 1..1485: mol_type = other DNA
atgaccagccgcgacggctatcagtggaccccggaaacgggtctgacccagggcgtaccgtccctgggtgtcatttcgccgccgactaacatcgaagataccgataaggacgggccttgggatgtcattgtcattgggggcgggtattgtgggctgaccgcaacccgtgatttaaccgtcgcagggttcaagacgctgctgctggaggcccgtgatcgtattggtggccgctcctggagcagtaacattgacggttacggttatgagatgggtggcacttgggttcattggcatcaatctcacgtgtggcgtgaaatcacgcgttataaaatgcacaacgcgctgtctccatcatttaacttttcacgtggcgtgaatcacttccaactgcgtaccaatccgaccaccagtacgtacatgacgcacgaagcggaggatgaactgctgcgtagcgcattgcataaattcaccaatgtcgacggcactaatggccgtacagtgttgccgttcccacatgatatgttttatgtgccggaatttcgcaagtatgacgaaatgtcatattccgaacgcattgaccagatccgcgacgaactgtctttgaacgaacgctctagtttagaggctttcattttattatgtagcggtggcaccctggaaaactccagctttggtgaatttctgcattggtgggcaatgtcgggttacacgtatcagggctgtatggattgtttaatctcctataaatttaaggatggccagagtgcgttcgcgcgtcgcttctgggaagaagccgctggcactggccgtctgggctatgtctttggttgtccggtgcgttctgtggtgaacgaacgcgacgcagtacgtgttaccgcacgtgacggtcgcgaattcgcagcgaaacgtttggtttgcacgattccgtcgaacgtattgagttctgttcattttagcccaccactgtccccgcaacgcatggccgctgcgaacattggccatgttaaccagtgcgtcaaagtgcatgcggaagtcagttgtccggatatgcgttcatggtcgggtatctcctatccgttcaacaaattagcctacgctatcggcgatggcacgaccccagcgggtaatacgcatattgtgtgccttgggggggcccataatcatatccagccggaagaggacgtggaagcaacgaagatggccgttgaaaacatgtcgcctgggaatatggatatcaaacgtctggtcttccacaactggtgcaaggatgaatttgccaaaggcgcgtggttcttcgcccctccacagctgctgtcaaagagcctggatgaactgcgctgccgtcacggtaatgtcctgtttgcaaactccgattgggccttaggttggcgtggttttatcgatggtgctatcgaggagggcacccgcgcagcggttactgtaattgaggaactgcgtcctgcgcctgcggtgcgttcccacctg

SEQ ID NO: 550 - protein, 495 aa, synthetic construct
  REGION 1..495: note = Variant of monoamine oxidase
MTSRDGYQWTPETGLTQGVPSLGVISPPTNIEDTDKDGPWDVIVIGGGYCGLTATRDLTVAGFKTLLLEARDRIGGRSWSSNIDGYGYEMGGTWVHWHQSHVWREITRYKMHNALSPSFNFSRGVNHFQLRTNPTTSTYMTHEAEDELLRSALHKFTNVDGTNGRTVLPFPHDMFYVPEFRKYDEMSYSERIDQIRDELSLNERSSLEAFILLCSGGTLENSSFGEFLHWWAMSGYTYQGCMDCLISYKFKDGQSAFARRFWEEAAGTGRLGYVFGCPVRSVVNERDAVRVTARDGREFAAKRLVCTIPSNVLSSVHFSPPLSPQRMAAANIGHVNQCVKVHAEVSCPDMRSWSGISYPFNKLAYAIGDGTTPAGNTHIVCLGGAHNHIQPEEDVEATKMAVENMSPGNMDIKRLVFHNWCKDEFAKGAWFFAPPQLLSKSLDELRCRHGNVLFANSDWALGWRGFIDGAIEEGTRAAVTVIEELRPAPAVRSHL

SEQ ID NO: 551 - DNA, 1485 bp, synthetic construct
  misc_feature 1..1485: note = Variant of monoamine oxidase
  source 1..1485: mol_type = other DNA
atgaccagccgcgacggctatcagtggaccccggaaacgggtctgacccagggcgtaccgtccctgggtgtcatttcgccgccgactaacatcgaagataccgataaggacgggccttgggatgtcattgtcattgggggcgggtattgtgggctgaccgcaacccgtgatttaaccgtcgcagggttcaagacgctgctgctggaggcccgtgatcgtattggtggccgctcctggagcagttttattgacggttacggttatgagatgggtggcacttgggttcattggcatcaatctcacgtgtggcgtgaaatcacgcgttataaaatgcacggcgcgctgtctaaatcatttaacttttcacgtggcgtgaatcacttccaactgcgtaccaatccgaccaccagtacgtacatgacgcacgaagcggaggatgaactgctgcgtagcgcattgcataaattcaccaatgtcgacggcactaatggccgtacagtgttgccgttcccacatgatatgttttatgtgccggaatttcgcaagtatgacgaaatgtcatattccgaacgcattgaccagatccgcgacgaactgtctttgaacgaacgctctagtttagaggctttcattttattatgtagcggtggcacctcggaaaactccagctttggtgaatttctgcattggtgggcaatgtcgggttacacgtatcagggctgtatggattgtttaatctcctataaatttaaggatggccagagtgcgttcgcgcgtcgcttctgggaagaagccgctggcactggccgtctgggctatgtctttggttgtccggtgcgttctgtggtgaacgaacgcgacgcagtacgtgttaccgcacgtgacggtcgcgaattcgcagcgaaacgtttggtttgcacgattccgctgaacgtattgagttctgttcattttagcccaccactgtccccgcaacgcatggccgctgcgaacattggccatgttaaccagtgcgtcaaagtgcatgcggaagtcagttgtccggatatgcgttcatggtcgggtatctcctatccgttcaacaaattagcctacgctatcggcgatggcacgaccccagcgggtaatacgcatattgtgtgccttgggggggcccataatcatatccagccggaagaggacgtggaagcaacgaagatggccgttgaaaacatgtcgcctgggaatatggatatcaaacgtctggtcttccacaactggtgcaaggatgaatttgccaaaggcgcgtggttcttcgcccctccacagctgctgtcaaagagcctggatgaactgcgctgccgtcacggtaatgtcctgtttgcaaactccgattgggccttaggttggcgtggttttatcgatggtgctatcgaggagggcacccgcgcagcggttactgtaattgaggaactgcgtcctgcgcctgcggtgcgttcccacctg

SEQ ID NO: 552 - protein, 495 aa, synthetic construct
  REGION 1..495: note = Variant of monoamine oxidase
MTSRDGYQWTPETGLTQGVPSLGVISPPTNIEDTDKDGPWDVIVIGGGYCGLTATRDLTVAGFKTLLLEARDRIGGRSWSSFIDGYGYEMGGTWVHWHQSHVWREITRYKMHGALSKSFNFSRGVNHFQLRTNPTTSTYMTHEAEDELLRSALHKFTNVDGTNGRTVLPFPHDMFYVPEFRKYDEMSYSERIDQIRDELSLNERSSLEAFILLCSGGTSENSSFGEFLHWWAMSGYTYQGCMDCLISYKFKDGQSAFARRFWEEAAGTGRLGYVFGCPVRSVVNERDAVRVTARDGREFAAKRLVCTIPLNVLSSVHFSPPLSPQRMAAANIGHVNQCVKVHAEVSCPDMRSWSGISYPFNKLAYAIGDGTTPAGNTHIVCLGGAHNHIQPEEDVEATKMAVENMSPGNMDIKRLVFHNWCKDEFAKGAWFFAPPQLLSKSLDELRCRHGNVLFANSDWALGWRGFIDGAIEEGTRAAVTVIEELRPAPAVRSHL

SEQ ID NO: 553 - DNA, 1485 bp, synthetic construct
  misc_feature 1..1485: note = Variant of monoamine oxidase
  source 1..1485: mol_type = other DNA
atgaccagccgcgacggctatcagtggaccccggaaacgggtctgacccagggcgtaccgtccctgggtgtcatttcgccgccgactaacatcgaagataccgataaggacgggccttgggatgtcattgtcattgggggcgggtattgtgggctgaccgcaacccgtgatttaaccgtcgcagggttcaagacgctgctgctggaggcccgtgatcgtattggtggccgctcctggagcagtaatattgacggttacccgtatgagatgggtggcacttgggttcattggcatcaatctcacgtgtggcgtgaaatcacgcgttataaaatgcacaacgcgctgtctccatcatttaacttttcacgtggcgtgaatcacttccaactgcgtaccaatccgaccaccagtacgtacatgacgcacgaagcggaggatgaactgctgcgtagcgcattgcataaattcaccaatgtcgacggcactaatggccgtacagtgttgccgttcccacatgatatgttttatgtgccggaatttcgcaagtatgacgaaatgtcatattccgaacgcattgaccagatccgcgacgaactgtctttgaacgaacgctctagtttagaggctttcattttattatgtagcggtggcaccctggaaaactccagctttggtgaatttctgcattggtgggcaatgtcgggttacacgcgtcagggctgtatggattgtttaatctcctataaatttaaggatggccagagtgcgttcgcgcgtcgcttctgggaagaagccgctggcactggccgtctgggctatgtctttggttgtccggtgcgttctgtggtgaacgaacgcgacgcagtacgtgttaccgcacgtgacggtcgcgaattcgcagcgaaacgtttggtttgcacgattccgctgaacgtattgagttctgttcattttagcccaccactgtccccgcaacgcatggccgctgcgaacatcggccatgttaaccagtgcgtcaaagtgcatgcggaagtcagttgtccggatatgcgttcatggtcgggtatctcctatccgttcaacaaattagcctacgctatcggcgatggcacgaccccagcgggtaatacgcatattgtggcgcttgggggggcccataatcatatccagccggaagaggacgtggaagcaacgaagatggccgttgaaaacatgtcgcctgggaatatggatatcaaacgtctggtcttccacaactggtgcaaggatgaatttgccaaaggcgggtggttcttcgcccctccacagctgctgtcaaagagcctggatgaactgcgctgccgtcacggtaatgtcctgtttgcaaactccgattgggccttaggttggcgtggttttatcgatggtgctatcgaggagggcacccgcgcagcggttactgtaattgaggaactgcgtcctgcgcctgcggtgcgttcccacctg

SEQ ID NO: 554 - protein, 495 aa, synthetic construct
  REGION 1..495: note = Variant of monoamine oxidase
MTSRDGYQWTPETGLTQGVPSLGVISPPTNIEDTDKDGPWDVIVIGGGYCGLTATRDLTVAGFKTLLLEARDRIGGRSWSSNIDGYPYEMGGTWVHWHQSHVWREITRYKMHNALSPSFNFSRGVNHFQLRTNPTTSTYMTHEAEDELLRSALHKFTNVDGTNGRTVLPFPHDMFYVPEFRKYDEMSYSERIDQIRDELSLNERSSLEAFILLCSGGTLENSSFGEFLHWWAMSGYTRQGCMDCLISYKFKDGQSAFARRFWEEAAGTGRLGYVFGCPVRSVVNERDAVRVTARDGREFAAKRLVCTIPLNVLSSVHFSPPLSPQRMAAANIGHVNQCVKVHAEVSCPDMRSWSGISYPFNKLAYAIGDGTTPAGNTHIVALGGAHNHIQPEEDVEATKMAVENMSPGNMDIKRLVFHNWCKDEFAKGGWFFAPPQLLSKSLDELRCRHGNVLFANSDWALGWRGFIDGAIEEGTRAAVTVIEELRPAPAVRSHL

SEQ ID NO: 555 - DNA, 1485 bp, synthetic construct
  misc_feature 1..1485: note = Variant of monoamine oxidase
  source 1..1485: mol_type = other DNA
atgaccagccgcgacggctatcagtggaccccggaaacgggtctgacccagggcgtaccgtccctgggtgtcatttcgccgccgactaacatcgaagataccgataaggacgggccttgggatgtcattgtcattgggggcgggtattgtgggctgaccgcaacccgtgatttaaccgtcgcagggttcaagacgctgctgctggaggcccgtgatcgtattggtggccgctcctggagcagtaatattgacggttacccgtatgagatgggtggcacttgggttcattggcatcaaccgcacgtgtggcgtgaaatcacgcgttataaaatgcacaacgcgctgtctccatcatttaacttttcacgtggcgtgaatcacttccaactgcgtaccaatccgaccaccagtacgtacatgacgcacgatgcgtcggctgaactgatgcgtagcgcattgcataaattcaccaatgtcgacggcactaatggccgtacagtgttgccgttcccacatgatatgttttatgtgccggaatttcgcaagtatgacgaaatgtcatattccgaacgcattgaccagatccgcgacgatctgtctttgaacgaacgctctagtttagaggctttcattttattatgtagcggtggcaccctggaaaactccagctttggtgaatttctgcattggtgggcaatgtcgggttacacgtatcagggctgtattgattgtttaatttcctataaatttaaggatggccagagtgcgttcgcgcgtcgcttctgggaagaagccgctggcactggccgtctgggctatgtctttggttgcccggtgcgttctgtggtgaacgaacgcgacgcagtacgtgttaccgcacgtgacggtcgcgaattcgcagcgaaacgtttggtttgcacgattccgctgaacgtattgagttctgttcattttagcccaccactgtccccgcaacgcatggccgctgcgaacattggccatgttaaccagtgcgtcaaagtgcatgcggaagtcagtaacaaggatatgcgttcatggtcgggtatctcctatccgttcaacaaattagcctacgctatcggcgatggcacgaccccagcgggtaatacgcatattgtgtgccttgggggggcccataatcatatccagccggaagaggacgtggaagcaacgaagatggccgttgaaaacatgtcgcctgggaatatggatatcaaacgtctggtcttccacaactggtgcaaggatgaatttgccaaaggcgcgtggttcttcgcccctccacagctgctgtcaaagagcctggatgaacgtcgcgcacgtcacggtaatgtcctgtttgcaaactccgattgggccttaggttggcgtggttttatcgatggtgctatcgaggagggcacccgcgcagcggttactgtaattgaggaactgcgtcctgcgcctgcggtgcgttcccacctg

SEQ ID NO: 556 - protein, 495 aa, synthetic construct
  REGION 1..495: note = Variant of monoamine oxidase
MTSRDGYQWTPETGLTQGVPSLGVISPPTNIEDTDKDGPWDVIVIGGGYCGLTATRDLTVAGFKTLLLEARDRIGGRSWSSNIDGYPYEMGGTWVHWHQPHVWREITRYKMHNALSPSFNFSRGVNHFQLRTNPTTSTYMTHDASAELMRSALHKFTNVDGTNGRTVLPFPHDMFYVPEFRKYDEMSYSERIDQIRDDLSLNERSSLEAFILLCSGGTLENSSFGEFLHWWAMSGYTYQGCIDCLISYKFKDGQSAFARRFWEEAAGTGRLGYVFGCPVRSVVNERDAVRVTARDGREFAAKRLVCTIPLNVLSSVHFSPPLSPQRMAAANIGHVNQCVKVHAEVSNKDMRSWSGISYPFNKLAYAIGDGTTPAGNTHIVCLGGAHNHIQPEEDVEATKMAVENMSPGNMDIKRLVFHNWCKDEFAKGAWFFAPPQLLSKSLDERRARHGNVLFANSDWALGWRGFIDGAIEEGTRAAVTVIEELRPAPAVRSHL

SEQ ID NO: 557 - DNA, 1485 bp, synthetic construct
  misc_feature 1..1485: note = Variant of monoamine oxidase
  source 1..1485: mol_type = other DNA
atgaccagccgcgacggctatcagtggaccccggaaacgggtctgacccagggcgtaccgtccctgggtgtcatttcgccgccgactaacatcgaagataccgataaggacgggccttgggatgtcattgtcattgggggcgggtattgtgggctgaccgcaacccgtgatttaaccgtcgcagggttcaagacgctgctgctggaggcccgtgatcgtattggtggccgctcctggagcagtaatattgacggttacccgtatgagatgggtggcacttgggttcattggcatcaaccgcacgtgtggcgtgaaatcacgcgttataaaatgcacaacgcgctgtctccatcatttaacttttcacgtggcgtgaatcacttccaactgcgtaccaatccgaccaccagtacgtacatgacgcacgaagcgtcggatgaactgatgcgtagcgcattgcataaattcaccaatgtcgacggcactaatggccgtacagtgttgccgttcccacatgatatgttttatgtgccggaatttcgcaagtatgacgaaatgtcatattccgaacgcattgaccagatccgcgacgaactgtctttgaacgaacgctctagtttagaggctttcattttattatgtagcggtggcaccctggaaaactccagctttggtgaatttctgcattggtgggcaatgtcgggttacacgtatcagggctgtatggattgtttaatctcctataaatttaaggatggccagagtgcgttcgcgcgtcgcttctgggaagaagccgctggcactggccgtctgggctatgtctttggttgcccggtgcgttctgtggtgaacgaacgcgacgcagtacgtgttaccgcacgtgacggtcgcgaattcgcagcgaaacgtttggtttgcacgattccgctgaacgtattgagttctgttcattttagcccaccactgtccccgcaacgcatggccgctgcgaacattggccatgttaaccagtgcgtcaaagtgcatgcggaagtcagtaacccagatatgcgttcatggtcgggtatctcctatccgttcaacaaattagcctacgctatcggcgatggcacgaccccagcgggtaatacgcatattgtgtgccttgggggggcccataatcatatccagccggaagaggacgtggaagcaacgaagatggccgttgaaaacatgtcgcctgggaatatggatatcaaacgtctggtcttccacaactggtgcaaggatgaatttgccaaaggcgcgtggttcttcgcccctccacagctgctgtcaaagagcctggatgaacgtcgcgcacgtcacggtaatgtcctgtttgcaaactccgattgggccttaggttggcgtggttttatcgatggtgctatcgaggagggcacccgcgcagcggttactgtaattgaggaactgcgtcctgcgcctgcggtgcgttcccacctg

SEQ ID NO: 558 - protein, 495 aa, synthetic construct
  REGION 1..495: note = Variant of monoamine oxidase
MTSRDGYQWTPETGLTQGVPSLGVISPPTNIEDTDKDGPWDVIVIGGGYCGLTATRDLTVAGFKTLLLEARDRIGGRSWSSNIDGYPYEMGGTWVHWHQPHVWREITRYKMHNALSPSFNFSRGVNHFQLRTNPTTSTYMTHEASDELMRSALHKFTNVDGTNGRTVLPFPHDMFYVPEFRKYDEMSYSERIDQIRDELSLNERSSLEAFILLCSGGTLENSSFGEFLHWWAMSGYTYQGCMDCLISYKFKDGQSAFARRFWEEAAGTGRLGYVFGCPVRSVVNERDAVRVTARDGREFAAKRLVCTIPLNVLSSVHFSPPLSPQRMAAANIGHVNQCVKVHAEVSNPDMRSWSGISYPFNKLAYAIGDGTTPAGNTHIVCLGGAHNHIQPEEDVEATKMAVENMSPGNMDIKRLVFHNWCKDEFAKGAWFFAPPQLLSKSLDERRARHGNVLFANSDWALGWRGFIDGAIEEGTRAAVTVIEELRPAPAVRSHL

SEQ ID NO: 559 - DNA, 1485 bp, synthetic construct
  misc_feature 1..1485: note = Variant of monoamine oxidase
  source 1..1485: mol_type = other DNA
atgaccagccgcgacggctatcagtggaccccggaaacgggtctgacccagggcgtaccgtccctgggtgtcatttcgccgccgactaacatcgaagataccgataaggacgggccttgggatgtcattgtcattgggggcgggtattgtgggctgaccgcaacccgtgatttaaccgtcgcagggttcaagacgctgctgctggaggcccgtgatcgtattggtggccgctcctggagcagtaatattgacggttacccgtatgagatgggtggcacttgggttcattggcatcaatcgcacgtgtggcgtgaaatcacgcgttataaaatgcacaacgcgctgtctccatcatttaacttttcacgtggcgtgaatcacttccaactgcgtaccaatccgaccaccagtacgtacatgacgcacgaagcggaggctgaactgctgcgtagcgcattgcataaattcaccaatgtcgacggcactaatggccgtacagtgttgccgttcccacatgatatgttttatgtgccggaatttcgcaagtatgacgaaatgtcatattccgaacgcattgaccagatccgcgacgaactgtctttgaacgaacgctctagtttagaggctttcattttattatgtagcggtggcaccctggaaaactccagctttggtgaatttctgcattggtgggcaatgtcgggttacacgtatcagggctgtatggattgtttaatctcctataaatttaaggatggccagagtgcgttcgcgcgtcgcttctgggaagaagccgctggcactggccgtctgggctatgtctttggtactccggtgcgttctgtggtgaacgaacgcgacgcagtacgtgttaccgcacgtgacggtcgcgaattcgcagcgaaacgtttggtttgcacgattccgctgaacgtattgagttctgttcattttagcccaccactgtccccgcaacgcatggccgctgcgaacattggccatgttaaccagtgcgtcaaagtgcatgcggaagtcagtaacccagatatgcgttcatggtcgggtatctcctatccgttcaacaaattagcctacgctatcggcgatggcacgaccccagcgggtaatacgcatattgtgtgccttgggggggcccataatcatatccagccggaagaggacgtggaagcaacgaagatggccgttgaaaacatgtcgcctgggaatatggatatcaaacgtctggtcttccacaactggtgcaaggatgaatttgccaaaggcgcgtggttcttcgcccctccacagctgctgtcaaagagcctggatgaacgtcgcgcacgtcacggtaatgtcctgtttgcaaactccgattgggccttaggttggcgtggttttatcgatggtgctatcgaggagggcacccgcgcagcggttactgtaattgaggaactgcgtcctgcgcctgcggtgcgttcccacctg

SEQ ID NO: 560 - protein, 495 aa, synthetic construct
  REGION 1..495: note = Variant of monoamine oxidase
MTSRDGYQWTPETGLTQGVPSLGVISPPTNIEDTDKDGPWDVIVIGGGYCGLTATRDLTVAGFKTLLLEARDRIGGRSWSSNIDGYPYEMGGTWVHWHQSHVWREITRYKMHNALSPSFNFSRGVNHFQLRTNPTTSTYMTHEAEAELLRSALHKFTNVDGTNGRTVLPFPHDMFYVPEFRKYDEMSYSERIDQIRDELSLNERSSLEAFILLCSGGTLENSSFGEFLHWWAMSGYTYQGCMDCLISYKFKDGQSAFARRFWEEAAGTGRLGYVFGTPVRSVVNERDAVRVTARDGREFAAKRLVCTIPLNVLSSVHFSPPLSPQRMAAANIGHVNQCVKVHAEVSNPDMRSWSGISYPFNKLAYAIGDGTTPAGNTHIVCLGGAHNHIQPEEDVEATKMAVENMSPGNMDIKRLVFHNWCKDEFAKGAWFFAPPQLLSKSLDERRARHGNVLFANSDWALGWRGFIDGAIEEGTRAAVTVIEELRPAPAVRSHL

SEQ ID NO: 561 - DNA, 1485 bp, synthetic construct
  misc_feature 1..1485: note = Variant of monoamine oxidase
  source 1..1485: mol_type = other DNA
atgaccagccgcgacggctatcagtggaccccggaaacgggtctgacccagggcgtaccgtccctgggtgtcatttcgccgccgactaacatcgaagataccgataaggacgggccttgggatgtcattgtcattgggggcgggtattgtgggctgaccgcaacccgtgatttaaccgtcgcagggttcaagacgctgctgctggaggcccgtgatcgtattggtggccgctcctggagcagtaacattgacggttacccgtatgagatgggtggcacttgggttcattggcatcaatctcacgtgtggcgtgaaatcacgcgttataaaatgcacaacgcgctgtctccgtcatttaacttttcacgtggcgtgaatcacttccaactgcgtaccaatccgaccaccagtacgtacatgacgcacgaagcggaggatgaactgctgcgtagcgcattgcataaattcaccaatgtcgacggcactaatggccgtacagtgttgccgttcccacatgatatgttttatgtgccggaatttcgcaagtatgacgaaatgtcatattccgaacgcattgaccagatccgcgacgaactgtctttgaacgaacgctctagtttagaggctttcattttattatgtagcggtggcaccctggaaaactccagctttggtgaatttctgcattggtgggcaatgtcgggttacacgtatcagggctgtatggattgtttaatctcctataaatttaaggatggccagagtgcgttcgcgcgtagcttctgggaagaagccgctggcactggccgtctgggctatgtctttggttgtccggtgcgttctgtggtgaacgaacgcgacgcagtacgtgttaccgcacgtgacggtcgcgaattcgcagcgaaacgtttggtttgcacgattccgctgaacgtattgagttctgttcattttagcccaccactgtccccgcaacgcatggccgctgcgaacattggccatgttaaccagtgcgtcaaagtgcatgcggaagtcagttgtccggatatgcgttcatggtcgggtatctcctatccgttcaacaaattagcctacgctatcggcgatggcacgaccccagcgggtaatacgcatattgtgtgccttgggggggcccataatcatatccagccggaagaggacgtggaagcaacgaagatggccgttgaaaacatgtcgcctgggaatatggatatcaaacgtctggtcttccacaactggtgcaaggatgaatttgccaaaggcgcgtggttcttcgcccctccacagctgctgtcaaagagcctggatgaactgcgctgccgtcacggtaatgtcctgtttgcaaactccgattgggccttaggttggcgtggttttatcgatggtgctatcgaggagggcacccgcgcagcggttactgtaattgaggaactgcgtcctgcgcctgcggtgcgttcccacctg

SEQ ID NO: 562 - protein, 495 aa, synthetic construct; identical to SEQ ID NO: 36
  REGION 1..495: note = Variant of monoamine oxidase

SEQ ID NO: 563 - DNA, 1485 bp, synthetic construct
  misc_feature 1..1485: note = Variant of monoamine oxidase
  source 1..1485: mol_type = other DNA
atgaccagccgcgacggctatcagtggaccccggaaacgggtctgacccagggcgtaccgtccctgggtgtcatttcgccgccgactaacatcgaagataccgataaggacgggccttgggatgtcattgtcattgggggcgggtattgtgggctgaccgcaacccgtgatttaaccgtcgcagggttcaagacgctgctgctggaggcccgtgatcgtattggtggccgctcctggagcagtaatattgacggttacccgtatgagatgggtggcacttgggttcattggcatcaaccgcacgtgtggcgtgaaatcacgcgttataaaatgcacaacgcgctgtctccatcatttaacttttcacgtggcgtgaatcacttccaactgcgtaccaatccgaccaccagtacgtacatgacgcacgaagcggaggatgaactgatgcgtagcgcattgcataaattcaccaatgtcgacggcactaatggccgtacagtgttgccgttcccacatgatatgttttatgtgccggaatttcgcaagtatgacgaaatgtcatattccgaacgcattgaccagatccgcgacgaactgtctttgaacgaacgctctagtttagaggctttcattttattatgtagcggtggcaccctggaaaactccagctttggtgaatttctgcattggtgggcaatgtcgggttacacgtatcagggctgtatggattgtttaatctcctataaagttaaggatggccagagtgcgttcgcgcgtcgcttctgggaagaagccgctggcactggccgtctgggctatgtctttggttgcccggtgcgttctgtggtgaacgaacgcgacgcagtacgtgttaccgcacgtgacggtcgcgaattcgcagcgaaacgtttggtttgcacgattccgctgaacgtattgagttctgttcattttagcccaccactgtccccgcaacgcatggccgctgcgaacattggccatgttaaccagtgcgtcaaagtgcatgcggaagtcagtaacccagatatgcgttcatggtcgggtatctcctatccgttcaacaaattagcctacgctatcggcgatggcacgaccccagcgggtaatacgcatattgtgtgccttgggggggcccataatcatatccagccggaagaggacgtggaagcaacgaagatggccgttgaaaacatgtcgcctgggaatatggatatcaaacgtctggtcttccacaactggtgcaaggatgaatttgccaaaggcgcgtggttcttcgcccctccacagctgctgtcaaagagcctggatgaactgcgcgcacgtcacggtaatgtcctgtttgcaaactccgattgggccttaggttggcgtggttttatcgatggtgctatcgaggagggcacccgcgcagcggttactgtaattgaggaactgcgtcctgcgcctgcggtgcgttcccacctg

SEQ ID NO: 564 - protein, 495 aa, synthetic construct
  REGION 1..495: note = Variant of monoamine oxidase
MTSRDGYQWTPETGLTQGVPSLGVISPPTNIEDTDKDGPWDVIVIGGGYCGLTATRDLTVAGFKTLLLEARDRIGGRSWSSNIDGYPYEMGGTWVHWHQPHVWREITRYKMHNALSPSFNFSRGVNHFQLRTNPTTSTYMTHEAEDELMRSALHKFTNVDGTNGRTVLPFPHDMFYVPEFRKYDEMSYSERIDQIRDELSLNERSSLEAFILLCSGGTLENSSFGEFLHWWAMSGYTYQGCMDCLISYKVKDGQSAFARRFWEEAAGTGRLGYVFGCPVRSVVNERDAVRVTARDGREFAAKRLVCTIPLNVLSSVHFSPPLSPQRMAAANIGHVNQCVKVHAEVSNPDMRSWSGISYPFNKLAYAIGDGTTPAGNTHIVCLGGAHNHIQPEEDVEATKMAVENMSPGNMDIKRLVFHNWCKDEFAKGAWFFAPPQLLSKSLDELRARHGNVLFANSDWALGWRGFIDGAIEEGTRAAVTVIEELRPAPAVRSHL

SEQ ID NO: 565 - DNA, 1485 bp, synthetic construct
  misc_feature 1..1485: note = Variant of monoamine oxidase
  source 1..1485: mol_type = other DNA
atgaccagccgcgacggctatcagtggaccccggaaacgggtctgacccagggcgtaccgtccctgggtgtcatttcgccgccgactaacatcgaagataccgataaggacgggccttgggatgtcattgtcattgggggcgggtattgtgggctgaccgcaacccgtgatttaaccgtcgcagggttcaagacgctgctgctggaggcccgtgatcgtattggtggccgctcctggagcagtcgcattgacggttacccgtatgagatgggtggcacttgggttcattggcatcaatctcacgtgtggcgtgaaatcacgcgttataaaatgcacaacgcgctgtctccatcatttaacttttcacgtggcgtgaatcacttccaactgcgtaccaatccgaccaccagtacgtacatgacgcacgaagcggaggatgaactgctgcgtagcgcattgcataaattcaccaatgtcgacggcactaatggccgtacagtgttgccgttcccacatgatatgttttatgtgccggaatttcgcaagtatgacgaaatgtcatattccgaacgcattgaccagatccgcgacgaactgtctttgaacgaacgctctagtttagaggctttcattttattatgtagcggtggcggctcggaaaactccagctttggtgaatttctgcattggtgggcaatgtcgggttacacgtatcagggctgtatggattgtttaatctcctataaatttaaggatggccagagtgcgttcgcgcgtcgcttctgggaagaagccgctggcactggccgtctgggctatgtctttggttgtccggtgcgttctgtggtgaacgaacgcgacgcagtacgtgttaccgcacgtgacggtcgcgaattcgcagcgaaacgtttggtttgcacgattccgctgaacgtattgagttctgttcattttagcccaccactgtccccgcaacgcatggccgctgcgaacattggccatgttaaccagtgcgtcaaagtgcatgcggaagtcagttgtccggatatgcgttcatggtcgggtatctcctatccgttcaacaaattagcctacgctatcggcgatggcacgaccccagcgggtaatacgcatattgtgtgccttgggggggcccataatcatatccagccggaagaggacgtggaagcaacgaagatggccgttgaaaacatgtcgcctgggaatatggatatcaaacgtctggtcttccataactggagcaaggatgaatttgccaaaggcgcgtggttcttcgcccctccacagctgctgtcaaagagcctggatgaactgcgctgccgtcacggtaatgtcctgtttgcaaactccgattgggccttaggttggcgtggttttatcgatggtgctatcgaggagggcacccgcgcagcggttactgtaattgaggaactgcgtcctgcgcctgcggtgcgttcccacctg

SEQ ID NO: 566 - protein, 495 aa, synthetic construct
  REGION 1..495: note = Variant of monoamine oxidase
MTSRDGYQWTPETGLTQGVPSLGVISPPTNIEDTDKDGPWDVIVIGGGYCGLTATRDLTVAGFKTLLLEARDRIGGRSWSSRIDGYPYEMGGTWVHWHQSHVWREITRYKMHNALSPSFNFSRGVNHFQLRTNPTTSTYMTHEAEDELLRSALHKFTNVDGTNGRTVLPFPHDMFYVPEFRKYDEMSYSERIDQIRDELSLNERSSLEAFILLCSGGGSENSSFGEFLHWWAMSGYTYQGCMDCLISYKFKDGQSAFARRFWEEAAGTGRLGYVFGCPVRSVVNERDAVRVTARDGREFAAKRLVCTIPLNVLSSVHFSPPLSPQRMAAANIGHVNQCVKVHAEVSCPDMRSWSGISYPFNKLAYAIGDGTTPAGNTHIVCLGGAHNHIQPEEDVEATKMAVENMSPGNMDIKRLVFHNWSKDEFAKGAWFFAPPQLLSKSLDELRCRHGNVLFANSDWALGWRGFIDGAIEEGTRAAVTVIEELRPAPAVRSHL

SEQ ID NO: 567 - DNA, 1485 bp, synthetic construct
  misc_feature 1..1485: note = Variant of monoamine oxidase
  source 1..1485: mol_type = other DNA
atgaccagccgcgacggctatcagtggaccccggaaacgggtctgacccagggcgtaccgtccctgggtgtcatttcgccgccgactaacatcgaagataccgataaggacgggccttgggatgtcattgtcattgggggcgggtattgtgggctgaccgcaacccgtgatttaaccgtcgcagggttcaagacgctgctgctggaggcccgtgatcgtattggtggccgctcctggagcagtaatattgacggttacccgtatgagatgggtggcacttgggttcattggcatcaatcgcacgtgtggcgtgaaatcacgcgttataaaatgcacaacgcgctgtctccatcatttaacttttcacgtggcgtgaatcacttccaactgcgtaccaatccgaccaccagtacgtacatgacgcacgaagcgtcggatgaactgctgcgtagcgcattgcataaattcaccaatgtcgacggcactaatggccgtacagtgttgccgttcccacatgatatgttttatgtgccggaatttcgcaagtatgacgaaatgtcatattccgaacgcattgaccagatccgcgacgaactgtctttgaacgaacgctctagtttagaggctttcattttattatgtagcggtggcaccctggaaaactccagctttggtgaatttctgcattggtgggcaatgtcgggttacacgtatcagggctgtatggattgtttaatgtcctataaatttaagggtggccagagtgcgttcgcgcgtcgcttctgggaagaagccgctggcactggccgtctgggctatgtctttggttgcccggtgcgttctgtggtgaacgaacgcgacgcagtacgtgttaccgcacgtgacggtcgcgaattcgcagcgaaacgtttggtttgcacgattccgctgaacgtattgagttctgttcattttagcccaccactgtccccgcaacgcatggccgctgcgaacattggccatgttaaccagtgcgtcaaagtgcatgcggaagtcagtgacccagatatgcgttcatggtcgggtatctcctatccgttcaacaaattagcctacgctatcggcgatggcacgaccccagcgggtaatacgcatattgtgtgccttgggggggcccataatcatatccagccggaagaggacgtggaagcaacgaagatggccgttgaaaacatgtcgcctgggaatatggatatcaaacgtctggtcttccacaactggtgcaaggatgaatttgccaaaggcgcgtggttcttcgcccctccacagctgctgtcaaagagcctggatgaactgcgcgcacgtcacggtaatgtcctgtttgcaaactccgattgggccttaggttggcgtggttttatcgatggtgctatcgaggagggcacccgcgcagcggttactgtaattgaggaactgcgtcctgcgcctgcggtgcgttcccacctg

SEQ ID NO: 568 - protein, 495 aa, synthetic construct
  REGION 1..495: note = Variant of monoamine oxidase
MTSRDGYQWTPETGLTQGVPSLGVISPPTNIEDTDKDGPWDVIVIGGGYCGLTATRDLTVAGFKTLLLEARDRIGGRSWSSNIDGYPYEMGGTWVHWHQSHVWREITRYKMHNALSPSFNFSRGVNHFQLRTNPTTSTYMTHEASDELLRSALHKFTNVDGTNGRTVLPFPHDMFYVPEFRKYDEMSYSERIDQIRDELSLNERSSLEAFILLCSGGTLENSSFGEFLHWWAMSGYTYQGCMDCLMSYKFKGGQSAFARRFWEEAAGTGRLGYVFGCPVRSVVNERDAVRVTARDGREFAAKRLVCTIPLNVLSSVHFSPPLSPQRMAAANIGHVNQCVKVHAEVSDPDMRSWSGISYPFNKLAYAIGDGTTPAGNTHIVCLGGAHNHIQPEEDVEATKMAVENMSPGNMDIKRLVFHNWCKDEFAKGAWFFAPPQLLSKSLDELRARHGNVLFANSDWALGWRGFIDGAIEEGTRAAVTVIEELRPAPAVRSHL

SEQ ID NO: 569 - DNA, 1485 bp, synthetic construct
  misc_feature 1..1485: note = Variant of monoamine oxidase
  source 1..1485: mol_type = other DNA
atgaccagccgcgacggctatcagtggaccccggaaacgggtctgacccagggcgtaccgtccctgggtgtcatttcgccgccgactaacatcgaagataccgataaggacgggccttgggatgtcattgtcattgggggcgggtattgtgggctgaccgcaacccgtgatttaaccgtcgcagggttcaagacgctgctgctggaggcccgtgatcgtattggtggccgctcctggagcagtaatattgacggttacccgtatgagatgggtggcacttgggttcattggcatcaaccgcacgtgtggcgtgaaatcacgcgttataaaatgcacaacgcgctgtctccatcatttaacttttcacgtggcgtgaatcacttccaactgcgtaccaatccgaccaccagtacgtacatgacgcacgaagcggaggctgaactgctgcgtagcgcattgcataaattcaccaatgtcgacggcactaatggccgtacagtgttgccgttcccacatgatatgttttatgtgccggaatttcgcaagtatgacgaaatgtcatattccgaacgcattgaccagatccgcgacgaactgtctttgaacgaacgctctagtttagaggctttcattttattatgtagcggtggcaccctggaaaactccagctttggtgaatttctgcattggtgggcaatgtcgggttacacgtatcagggctgtatggattgtttaatctcctataaatttaaggatggccagagtgcgttcgcgcgtcgcttctgggaagaagccgctggcactggccgtctgggctatgtctttggttgtccggtgcgttctgtggtgaacgaacgcgacgcagtacgtgttaccgcacgtgacggtcgcgaattcgcagcgaaacgtttggtttgcacgattccgctgaacgtattgagttctgttcattttagcccaccactgtccccgcaacgcatggccgctgcgaacattggccatgttaaccagtgcgtcaaagtgcatgcggaagtcagtgacaaggatatgcgttcatggtcgggtatctcctatccgttcaacaaattagcctacgctatcggcgatggcacgaccccagcgggtaatacgcatattgtgtgccttgggggggcccataatcatatccagccggaagaggacgtggaagcaacgaagatggccgttgaaaacatgtcgcctgggaatatggatatcaaacgtctggtcttccacaactggtgcaaggatgaatttgccaaaggcgcgtggttcttcgcccctccacagctgctgtcaaagagcctggatgaacgtcgcgcacgtcacggtaatgtcctgtttgcaaactccgattgggccttaggttggcgtggttttatcgatggtgctatcgaggagggcacccgcgcagcggttactgtaattgaggaactgcgtcctgcgcctgcggtgcgttcccacctg

SEQ ID NO: 570 - protein, 495 aa, synthetic construct
  REGION 1..495: note = Variant of monoamine oxidase
MTSRDGYQWTPETGLTQGVPSLGVISPPTNIEDTDKDGPWDVIVIGGGYCGLTATRDLTVAGFKTLLLEARDRIGGRSWSSNIDGYPYEMGGTWVHWHQPHVWREITRYKMHNALSPSFNFSRGVNHFQLRTNPTTSTYMTHEAEAELLRSALHKFTNVDGTNGRTVLPFPHDMFYVPEFRKYDEMSYSERIDQIRDELSLNERSSLEAFILLCSGGTLENSSFGEFLHWWAMSGYTYQGCMDCLISYKFKDGQSAFARRFWEEAAGTGRLGYVFGCPVRSVVNERDAVRVTARDGREFAAKRLVCTIPLNVLSSVHFSPPLSPQRMAAANIGHVNQCVKVHAEVSDKDMRSWSGISYPFNKLAYAIGDGTTPAGNTHIVCLGGAHNHIQPEEDVEATKMAVENMSPGNMDIKRLVFHNWCKDEFAKGAWFFAPPQLLSKSLDERRARHGNVLFANSDWALGWRGFIDGAIEEGTRAAVTVIEELRPAPAVRSHL

SEQ ID NO: 571 - DNA, 1485 bp, synthetic construct
  misc_feature 1..1485: note = Variant of monoamine oxidase
  source 1..1485: mol_type = other DNA
atgaccagccgcgacggctatcagtggaccccggaaacgggtctgacccagggcgtaccgtccctgggtgtcatttcgccgccgactaacatcgaagataccgataaggacgggccttgggatgtcattgtcattgggggcgggtattgtgggctgaccgcaacccgtgatttaaccgtcgcagggttcaagacgctgctgctggaggcccgtgatcgtattggtggccgctcctggagcagtaatattgacggttacccgtatgagatgggtggcacttgggttcattggcatcaaccgcacgtgtggcgtgaaatcacgcgttataaaatgcacaacgcgctgtctccatcatttaacttttcacgtggcgtgaatcacttccaactgcgtaccaatccgaccaccagtacgtacatgacgcacgaagcgggggatgaactgatgcgtagcgcattgcataaattcaccaatgtcgacggcactaatggccgtacagtgttgccgttcccacatgatatgttttatgtgccggaatttcgcaagtatgacgaaatgtcatattccgaacgcattgaccagatccgcgacgaactgtctttgaacgaacgctctagtttagaggctttcattttattatgtagcggtggcaccctggaaaactccagctttggtgaatttctgcattggtgggcaatgtcgggttacacgtatcagggctgtattgattgtttaatttcctataaatttaaggatggccagagtgcgttcgcgcgtcgcttctgggaagaagccgctggcactggccgtctgggctatgtctttggttgtccggtgcgttctgtggtgaacgaacgcgacgcagtacgtgttaccgcacgtgacggtcgcgaattcgcagcgaaacgtttggtttgcacgattccgctgaacgtattgagttctgttcattttagcccaccactgtccccgcaacgcatggccgctgcgaacattggccatgttaaccagtgcgtcaaagtgcatgcggaagtcagttgcccagatatgcgttcatggtcgggtatctcctatccgttcaacaaattagcctacgctatcggcgatggcacgaccccagcgggtaatacgcatattgtgtgccttgggggggcccataatcatatccagccggaagaggacgtggaagcaacgaagatggccgttgaaaacatgtcgcctgggaatatggatatcaaacgtctggtcttccacaactggtgcaaggatgaatttgccaaaggcgcgtggttcttcgcccctccacagctgctgtcaaagagcctggatgaacgtcgcgcacgtcacggtaatgtcctgtttgcaaactccgattgggccttaggttggcgtggttttatcgatggtgctatcgaggagggcacccgcgcagcggttactgtaattgaggaactgcgtcctgcgcctgcggtgcgttcccacctg

SEQ ID NO: 572 - protein, 495 aa, synthetic construct
  REGION 1..495: note = Variant of monoamine oxidase
MTSRDGYQWTPETGLTQGVPSLGVISPPTNIEDTDKDGPWDVIVIGGGYCGLTATRDLTVAGFKTLLLEARDRIGGRSWSSNIDGYPYEMGGTWVHWHQPHVWREITRYKMHNALSPSFNFSRGVNHFQLRTNPTTSTYMTHEAGDELMRSALHKFTNVDGTNGRTVLPFPHDMFYVPEFRKYDEMSYSERIDQIRDELSLNERSSLEAFILLCSGGTLENSSFGEFLHWWAMSGYTYQGCIDCLISYKFKDGQSAFARRFWEEAAGTGRLGYVFGCPVRSVVNERDAVRVTARDGREFAAKRLVCTIPLNVLSSVHFSPPLSPQRMAAANIGHVNQCVKVHAEVSCPDMRSWSGISYPFNKLAYAIGDGTTPAGNTHIVCLGGAHNHIQPEEDVEATKMAVENMSPGNMDIKRLVFHNWCKDEFAKGAWFFAPPQLLSKSLDERRARHGNVLFANSDWALGWRGFIDGAIEEGTRAAVTVIEELRPAPAVRSHL

SEQ ID NO: 573 - DNA, 1485 bp, synthetic construct
  misc_feature 1..1485: note = Variant of monoamine oxidase
  source 1..1485: mol_type = other DNA
atgaccagccgcgacggctatcagtggaccccggaaacgggtctgacccagggcgtaccgtccctgggtgtcatttcgccgccgactaacatcgaagataccgataaggacgggccttgggatgtcattgtcattgggggcgggtattgtgggctgaccgcaacccgtgatttaaccgtcgcagggttcaagacgctgctgctggaggcccgtgatcgtattggtggccgctcctggagcagtaatattgacggttacccgtatgagatgggtggcacttgggttcattggcatcaatctcacgtgtggcgtgaaatcacgcgttataaaatgcacaacgcgctgtctccgtcatttaacttttcacgtggcgtgaatcacttccaactgcgtaccaatccgaccaccagtacgtacatgacgcacgaagcggaggatgaactgctgcgtagcgcattgcataaattcaccaatgtcgacggcactaatggccgtacagtgttgccgttcccacatgatatgttttatgtgccggaatttcgcaagtatgacgaaatgtcatattccgaacgcattgaccagatccgcgacgaactgtctttgaacgaacgctctagtttagaggctttcattttattatgtagcggtggcaccctggaaaactccagctttggtgaatttctgcattggtgggcaatgtcgggttacacgtatcagggctgtatggattgtttaatctcctataaatttaaggatggccagagtgcgttcgcgcgtcgcttctgggaagaagccgctggcactggccgtctgggctatgtctttggttgtccggtgcgttctgtggtgaacgaacgcgacgcagtacgtgttaccgcacgtgacggtcgcgaattcgcagcgaaacgtttggtttgcacgattccgtcgaacgtattgagttctgttcattttagcccaccactgtccccgcaacgcatggccgctgcgaacattggccatgttaaccagtgcgtcaaagtgcatgcggaagtcagttgtccggatatgcgttcatggtcgggtatctcctatccgttcaacaaattagcctacgctatcggcgatggcacgaccccagcgggtaatacgcatattgtgtgccttgggggggcccataatcatatccagccggaagaggacgtggaagcaacgaagatggccgttgaaaacatgtcgcctgggaatatggatatcaaacgtctggtcttcgggaactggagcaaggatgaatttgccaaaggcgcgtggttcttcgcccctccacagctgctgtcaaagagcctggatgaactgcgctgccgtcacggtaatgtcctgtttgcaaactccgattgggccttaggttggcgtggttttatcgatggtgctatcgaggagggcacccgcgcagcggttactgtaattgaggaactgcgtcctgcgcctgcggtgcgttcccacctg

SEQ ID NO: 574 - protein, 495 aa, synthetic construct
  REGION 1..495: note = Variant of monoamine oxidase
MTSRDGYQWTPETGLTQGVPSLGVISPPTNIEDTDKDGPWDVIVIGGGYCGLTATRDLTVAGFKTLLLEARDRIGGRSWSSNIDGYPYEMGGTWVHWHQSHVWREITRYKMHNALSPSFNFSRGVNHFQLRTNPTTSTYMTHEAEDELLRSALHKFTNVDGTNGRTVLPFPHDMFYVPEFRKYDEMSYSERIDQIRDELSLNERSSLEAFILLCSGGTLENSSFGEFLHWWAMSGYTYQGCMDCLISYKFKDGQSAFARRFWEEAAGTGRLGYVFGCPVRSVVNERDAVRVTARDGREFAAKRLVCTIPSNVLSSVHFSPPLSPQRMAAANIGHVNQCVKVHAEVSCPDMRSWSGISYPFNKLAYAIGDGTTPAGNTHIVCLGGAHNHIQPEEDVEATKMAVENMSPGNMDIKRLVFGNWSKDEFAKGAWFFAPPQLLSKSLDELRCRHGNVLFANSDWALGWRGFIDGAIEEGTRAAVTVIEELRPAPAVRSHL

SEQ ID NO: 575 - DNA, 1485 bp, synthetic construct
  misc_feature 1..1485: note = Variant of monoamine oxidase
  source 1..1485: mol_type = other DNA
atgaccagccgcgacggctatcagtggaccccggaaacgggtctgacccagggcgtaccgtccctgggtgtcatttcgccgccgactaacatcgaagataccgataaggacgggccttgggatgtcattgtcattgggggcgggtattgtgggctgaccgcaacccgtgatttaaccgtcgcagggttcaagacgctgctgctggaggcccgtgatcgtattggtggccgctcctggagcagtaatattgacggttacccgtatgagatgggtggcacttgggttcattggcatcaatctcacgtgtggcgtgaaatcacgcgttataaaatgcacaacgcgctgtctccatcatttaacttttcacgtggcgtgaatcacttccaactgcgtaccaatccgaccaccagtacgtacatgacgcacgaagcggaggatgaactgctgcgtagcgcattgcataaattcaccaatgtcgacggcactaatggccgtacagtgttgccgttcccacatgatatgttttatgtgccggaatttcgcaagtatgacgaaatgtcatattccgaacgcattgaccagatccgcgacgaactgtctttgaacgaacgctctagtttagaggctttcattttattatgtagcggtggcaccctggaaaactccagctttggtgaatttctgcattggtgggcaatgtcgggttacacgcgtcagggctgtatggattgtttaatctcctataaatttaaggatggccagagtgcgttcgcgcgtcgcttctgggaagaagccgctggcactggccgtctgggctatgtctttggttgtccggtgcgttctgtggtgaacgaacgcgacgcagtacgtgttaccgcacgtgacggtcgcgaattcgcagcgaaacgtttggtttgcacgattccgctgaacgtattgagttctgttcattttagcccaccactgtccccgcaacgcatggccgctgcgaacatcggccatgttaaccagtgcgtcaaagtgcatgcggaagtcagttgtccggatatgcgttcatggtcgggtatctcctatccgttcaacaaattagcctacgctatcggcgatggcacgaccccagcgggtaatacgcatattgtgtgccttgggggggccgagaatcatatccagccggaagaggacgtggaagcaacgaagatggccgttgaaaacatgtcgcctgggaatatggatatcaaacgtctggtcttccacaactggtgcaaggatgaatttgccaaaggcgcgtggttcttcgcccctccacagctgctgtcaaagagcctggatgaactgcgctgccgtcacggtaatgtcctgtttgcaaactccgattgggccttaggttggcgtggttttatcgatggtgctatcgaggagggcacccgcgcagcggttactgtaattgaggaactgcgtcctgcgcctgcggtgcgttcccacctg

SEQ ID NO: 576 - protein, 495 aa, synthetic construct
  REGION 1..495: note = Variant of monoamine oxidase
MTSRDGYQWTPETGLTQGVPSLGVISPPTNIEDTDKDGPWDVIVIGGGYCGLTATRDLTVAGFKTLLLEARDRIGGRSWSSNIDGYPYEMGGTWVHWHQSHVWREITRYKMHNALSPSFNFSRGVNHFQLRTNPTTSTYMTHEAEDELLRSALHKFTNVDGTNGRTVLPFPHDMFYVPEFRKYDEMSYSERIDQIRDELSLNERSSLEAFILLCSGGTLENSSFGEFLHWWAMSGYTRQGCMDCLISYKFKDGQSAFARRFWEEAAGTGRLGYVFGCPVRSVVNERDAVRVTARDGREFAAKRLVCTIPLNVLSSVHFSPPLSPQRMAAANIGHVNQCVKVHAEVSCPDMRSWSGISYPFNKLAYAIGDGTTPAGNTHIVCLGGAENHIQPEEDVEATKMAVENMSPGNMDIKRLVFHNWCKDEFAKGAWFFAPPQLLSKSLDELRCRHGNVLFANSDWALGWRGFIDGAIEEGTRAAVTVIEELRPAPAVRSHL

SEQ ID NO: 577 - DNA, 1485 bp, synthetic construct
  misc_feature 1..1485: note = Variant of monoamine oxidase
  source 1..1485: mol_type = other DNA
atgaccagccgcgacggctatcagtggaccccggaaacgggtctgacccagggcgtaccgtccctgggtgtcatttcgccgccgactaacatcgaagataccgataaggacgggccttgggatgtcattgtcattgggggcgggtattgtgggctgaccgcaacccgtgatttaaccgtcgcagggttcaagacgctgctgctggaggcccgtgatcgtattggtggccgctcctggagcagtaatattgacggttacccgtatgagatgggtggcggctgggttcattggcatcaatctcacgtgtggcgtgaaatcacgcgttataaaatgcacaacgcgctgtctccatcatttaacttttcacgtggcgtgaatcacttccaactgcgtaccaatccgaccaccagtacgtacatgacgcacgaagcggaggatgaactgctgcgtagcgcattgcataaattcaccaatgtcgacggcactaatggccgtacagtgttgccgttcccacatgatatgttttatgtgccggaatttcgcaagtatgatgaaatgtcatattccgaacgcattgaccagatccgcgacgaactgtctttgaacgaacgctctagtttagaggctttcattttattatgtagcggtggcaccctggaaaactccagctttggtgaatttctgcattggtgggcaatgtcgggttacacgcgtcagggctgtatggattgtttaatctcctataaatttaaggatggccagagtgcgttcgcgcgtcgcttctgggaagaagccgctggcactggccgtctgggctatgtctttggttgtccggtgcgttctgtggtggatgaacgcgacgcagtacgtgttaccgcacgtgacggtcgcgaattcgcagcgaaacgtttggtttgcacgattccgctgaacgtattgagttctgttcattttagcccaccactgtccccgcaacgcatggccgctgcgaacattggccatgttaaccagtgcgtcaaagtgcatgcggaagtcagttgtccggatatgcgttcatggtcgggtatctcctatccgttcaacaaattagcctacgctatcggcgatggcacgaccccagcgggtaatacgcatattgtgtgccttgggggggcccataatcatatccagccggaagaggacgtggaagcaacgaagatggccgttgaaaacatgtcgcctgggaatatggatatcaaacgtctggtcttccacaactggtgcaaggatgaatttgccaaaggcgcgtggttcttcgcccctccacagctgctgtcaaagagcctggatgaactgcgctgccgtcacggtaatgtcctgtttgcaaactccgattgggccttaggttggcgtggttttatcgatggtgctatcgaggagggcacccgcgcagcggttactgtaattgaggaactgcgtcctgcgcctgcggtgcgttcccacctg

SEQ ID NO: 578 - protein, 495 aa, synthetic construct
  REGION 1..495: note = Variant of monoamine oxidase
MTSRDGYQWTPETGLTQGVPSLGVISPPTNIEDTDKDGPWDVIVIGGGYCGLTATRDLTVAGFKTLLLEARDRIGGRSWSSNIDGYPYEMGGGWVHWHQSHVWREITRYKMHNALSPSFNFSRGVNHFQLRTNPTTSTYMTHEAEDELLRSALHKFTNVDGTNGRTVLPFPHDMFYVPEFRKYDEMSYSERIDQIRDELSLNERSSLEAFILLCSGGTLENSSFGEFLHWWAMSGYTRQGCMDCLISYKFKDGQSAFARRFWEEAAGTGRLGYVFGCPVRSVVDERDAVRVTARDGREFAAKRLVCTIPLNVLSSVHFSPPLSPQRMAAANIGHVNQCVKVHAEVSCPDMRSWSGISYPFNKLAYAIGDGTTPAGNTHIVCLGGAHNHIQPEEDVEATKMAVENMSPGNMDIKRLVFHNWCKDEFAKGAWFFAPPQLLSKSLDELRCRHGNVLFANSDWALGWRGFIDGAIEEGTRAAVTVIEELRPAPAVRSHL

SEQ ID NO: 579 - DNA, 1485 bp, synthetic construct; identical to SEQ ID NO: 19
  misc_feature 1..1485: note = Variant of monoamine oxidase
  source 1..1485: mol_type = other DNA

SEQ ID NO: 580 - protein, 495 aa, synthetic construct; identical to SEQ ID NO: 20
  REGION 1..495: note = Variant of monoamine oxidase

SEQ ID NO: 581 - DNA, 1485 bp, synthetic construct
  misc_feature 1..1485: note = Variant of monoamine oxidase
  source 1..1485: mol_type = other DNA
atgaccagccgcgacggctatcagtggaccccggaaacgggtctgacccagggcgtaccgtccctgggtgtcatttcgccgccgactaacatcgaagataccgataaggacgggccttgggatgtcattgtcattgggggcgggtattgtgggctgaccgcaacccgtgatttaaccgtcgcagggttcaagacgctgctgctggaggcccgtgatcgtattggtggccgctcctggagcagtaatattgacggttacccgtatgagatgggtggcacttgggttcattggcatcaatctcacgtgtggcgtgaaatcacgcgttataaaatgcacaacgcgctgtctccatcatttaacttttcacgtggcgtgaatcacttccaactgcgtaccaatccgaccaccagtacgtacatgacgcacgaagcggaggatgaactgctgcgtagcgcattgcataaattcaccaatgtcgacggcactaatggccgtacagtgttgccgttcccacatgatatgttttatgtgccggaatttcgcaagtatgatgaaatgtcatattccgaacgcattgaccagatccgcgacgaactgtctttgaacgaacgctctagtttagaggctttcattttattatgtagcggtggcaccctggaaaactccagctttggtgaatttctgcattggtgggcaatgtcgggttacacgtaccagggctgtatggattgtttaatctcctataaatttaaggatggccagagtgcgttcgcgcgtcgcttctgggaagaagccgctggcactggccgtctgggctatgtctttggttgtccggtgcgttctgtggtgaacgaacgcgacgcagtacgtgttaccgcacgtgacggtcgcgaattcgcagcgaaacgtttggtttgcacgattccgctgaacgtattgagttctgttcattttagcccaccactgtccccgcaacgcatggccgctgcgaacggcggccatgttaaccagtgcgtcaaagtgcatgcggaagtcagttgtccggatatgcgttcatggtcgggtatctcctatccgttcaacaaattagcctacgctatcggcgatggcacgaccccagcgggtaatacgcatattgtgtgccttgggggggcccataatcatatccagccggaagaggacgtggaagcaacgaagatggccgttgaaaacatgtcgcctgggaatatggatatcaaacgtctggtcttccacaactggtgcaaggatgaatttgccaaaggcgggtggttcttcgcccctccacagctgctgtcaaagagcctggatgaactgcgctgccgtcacggtaatgtcctgtttgcaaactccgattgggccttaggttggcgtggttttatcgatggtgctatcgaggagggcacccgcgcagcggttactgtaattgaggaactgcgtcctgcgcctgcggtgcgttcccacctg

SEQ ID NO: 582 - protein, 495 aa, synthetic construct
  REGION 1..495: note = Variant of monoamine oxidase
MTSRDGYQWTPETGLTQGVPSLGVISPPTNIEDTDKDGPWDVIVIGGGYCGLTATRDLTVAGFKTLLLEARDRIGGRSWSSNIDGYPYEMGGTWVHWHQSHVWREITRYKMHNALSPSFNFSRGVNHFQLRTNPTTSTYMTHEAEDELLRSALHKFTNVDGTNGRTVLPFPHDMFYVPEFRKYDEMSYSERIDQIRDELSLNERSSLEAFILLCSGGTLENSSFGEFLHWWAMSGYTYQGCMDCLISYKFKDGQSAFARRFWEEAAGTGRLGYVFGCPVRSVVNERDAVRVTARDGREFAAKRLVCTIPLNVLSSVHFSPPLSPQRMAAANGGHVNQCVKVHAEVSCPDMRSWSGISYPFNKLAYAIGDGTTPAGNTHIVCLGGAHNHIQPEEDVEATKMAVENMSPGNMDIKRLVFHNWCKDEFAKGGWFFAPPQLLSKSLDELRCRHGNVLFANSDWALGWRGFIDGAIEEGTRAAVTVIEELRPAPAVRSHL

SEQ ID NO: 583 - DNA, 1485 bp, synthetic construct
  misc_feature 1..1485: note = Variant of monoamine oxidase
  source 1..1485: mol_type = other DNA
atgaccagccgcgacggctatcagtggaccccggaaacgggtctgacccagggcgtaccgtccctgggtgtcatttcgccgccgactaacatcgaagataccgataaggacgggccttgggatgtcattgtcattgggggcgggtattgtgggctgaccgcaacccgtgatttaaccgtcgcagggttcaagacgctgctgctggaggcccgtgatcgtattggtggccgctcctggagcagtaatattgacggttacccgtatgagatgggtggcacttgggttcattggcatcaatcgcacgtgtggcgtgaaatcacgcgttataaaatgcacaacgcgctgtctccatcatttaacttttcacgtggcgtgaatcacttccaactgcgtaccaatccgaccaccagtacgtacatgacgcacgaagcggaggctgaactgctgcgtagcgcattgcataaattcaccaatgtcgacggcactaatggccgtacagtgttgccgttcccacatgatatgttttatgtgccggaatttcgcaagtatgacgaaatgtcatattccgaacgcattgaccagatccgcgacgaactgtctttgaacgaacgctctagtttagaggctttcattttattatgtagcggtggcaccctggaaaactccagctttggtgaatttctgcattggtgggcaatgtcgggttacacgtatcagggctgtatggattgtttaatttcctataaatttaaggatggccagagtgcgttcgcgcgtcgcttctgggaagaagccgctggcactggccgtctgggctatgtctttggttgcccggtgcgttctgtggtgaacgaacgcgacgcagtacgtgttaccgcacgtgacggtcgcgaattcgcagcgaaacgtttggtttgcacgattccgctgaacgtattgagttctgttcattttagcccaccactgtccccgcaacgcatggccgctgcgaacattggccatgttaaccagtgcgtcaaagtgcatgcggaagtcagttgcccagatatgcgttcatggtcgggtatctcctatccgttcaacaaattagcctacgctatcggcgatggcacgaccccagcgggtaatacgcatattgtgtgccttgggggggcccataatcatatccagccggaagaggacgtggaagcaacgaagatggccgttgaaaacatgtcgcctgggaatatggatatcaaacgtctggtcttccacaactggtgcaaggatgaatttgccaaaggcgcgtggttcttcgcccctccacagctgctgtcaaagagcctggatgaacgtcgcgcacgtcacggtaatgtcctgtttgcaaactccgattgggccttaggttggcgtggttttatcgatggtgctatcgaggagggcacccgcgcagcggttactgtaattgaggaactgcgtcctgcgcctgcggtgcgttcccacctg

SEQ ID NO: 584 - protein, 495 aa, synthetic construct
  REGION 1..495: note = Variant of monoamine oxidase
MTSRDGYQWTPETGLTQGVPSLGVISPPTNIEDTDKDGPWDVIVIGGGYCGLTATRDLTVAGFKTLLLEARDRIGGRSWSSNIDGYPYEMGGTWVHWHQSHVWREITRYKMHNALSPSFNFSRGVNHFQLRTNPTTSTYMTHEAEAELLRSALHKFTNVDGTNGRTVLPFPHDMFYVPEFRKYDEMSYSERIDQIRDELSLNERSSLEAFILLCSGGTLENSSFGEFLHWWAMSGYTYQGCMDCLISYKFKDGQSAFARRFWEEAAGTGRLGYVFGCPVRSVVNERDAVRVTARDGREFAAKRLVCTIPLNVLSSVHFSPPLSPQRMAAANIGHVNQCVKVHAEVSCPDMRSWSGISYPFNKLAYAIGDGTTPAGNTHIVCLGGAHNHIQPEEDVEATKMAVENMSPGNMDIKRLVFHNWCKDEFAKGAWFFAPPQLLSKSLDERRARHGNVLFANSDWALGWRGFIDGAIEEGTRAAVTVIEELRPAPAVRSHL

SEQ ID NO: 585 - DNA, 1485 bp, synthetic construct
  misc_feature 1..1485: note = Variant of monoamine oxidase
  source 1..1485: mol_type = other DNA
atgaccagccgcgacggctatcagtggaccccggaaacgggtctgacccagggcgtaccgtccctgggtgtcatttcgccgccgactaacatcgaagataccgataaggacgggccttgggatgtcattgtcattgggggcgggtattgtgggctgaccgcaacccgtgatttaaccgtcgcagggttcaagacgctgctgctggaggcccgtgatcgtattggtggccgctcctggagcagtaatattgacggttacccgtatgagatgggtggcacttgggttcattggcatcaaccgcacgtgtggcgtgaaatcacgcgttataaaatgcacaacgcgctgtctccatcatttaacttttcacgtggcgtgaatcacttccaactgcgtaccaatccgaccaccagtacgtacatgacgcacgaagcgggggatgaactgatgcgtagcgcattgcataaattcaccaatgtcgacggcactaatggccgtacagtgttgccgttcccacatgatatgttttatgtgccggaatttcgcaagtatgacgaaatgtcatattccgaacgcattgaccagatccgcgacgaactgtctttgaacgaacgctctagtttagaggctttcattttattatgtagcggtggcaccctggaaaactccagctttggtgaatttctgcattggtgggcaatgtcgggttacacgtatcagggctgtattgattgtttaatgtcctataaatttaaggatggccagagtgcgttcgcgcgtcgcttctgggaagaagccgctggcactggccgtctgggctatgtctttggttgcccggtgcgttctgtggtgaacgaacgcgacgcagtacgtgttaccgcacgtgacggtcgcgaattcgcagcgaaacgtttggtttgcacgattccgctgaacgtattgagttctgttcattttagcccaccactgtccccgcaacgcatggccgctgcgaacattggccatgttaaccagtgcgtcaaagtgcatgcggaagtcagtgacaaggatatgcgttcatggtcgggtatctcctatccgttcaacaaattagcctacgctatcggcgatggcacgaccccagcgggtaatacgcatattgtgtgccttgggggggcccataatcatatccagccggaagaggacgtggaagcaacgaagatggccgttgaaaacatgtcgcctgggaatatggatatcaaacgtctggtcttccacaactggtgcaaggatgaatttgccaaaggcgcgtggttcttcgcccctccacagctgctgtcaaagagcctggatgaacgtcgcgcacgtcacggtaatgtcctgtttgcaaactccgattgggccttaggttggcgtggttttatcgatggtgctatcgaggagggcacccgcgcagcggttactgtaattgaggaactgcgtcctgcgcctgcggtgcgttcccacctg

SEQ ID NO: 586 - protein, 495 aa, synthetic construct
  REGION 1..495: note = Variant of monoamine oxidase
MTSRDGYQWTPETGLTQGVPSLGVISPPTNIEDTDKDGPWDVIVIGGGYCGLTATRDLTVAGFKTLLLEARDRIGGRSWSSNIDGYPYEMGGTWVHWHQPHVWREITRYKMHNALSPSFNFSRGVNHFQLRTNPTTSTYMTHEAGDELMRSALHKFTNVDGTNGRTVLPFPHDMFYVPEFRKYDEMSYSERIDQIRDELSLNERSSLEAFILLCSGGTLENSSFGEFLHWWAMSGYTYQGCIDCLMSYKFKDGQSAFARRFWEEAAGTGRLGYVFGCPVRSVVNERDAVRVTARDGREFAAKRLVCTIPLNVLSSVHFSPPLSPQRMAAANIGHVNQCVKVHAEVSDKDMRSWSGISYPFNKLAYAIGDGTTPAGNTHIVCLGGAHNHIQPEEDVEATKMAVENMSPGNMDIKRLVFHNWCKDEFAKGAWFFAPPQLLSKSLDERRARHGNVLFANSDWALGWRGFIDGAIEEGTRAAVTVIEELRPAPAVRSHL

SEQ ID NO: 587 - DNA, 1485 bp, synthetic construct
  misc_feature 1..1485: note = Variant of monoamine oxidase
  source 1..1485: mol_type = other DNA
atgaccagccgcgacggctatcagtggaccccggaaacgggtctgacccagggcgtaccgtccctgggtgtcatttcgccgccgactaacatcgaagataccgataaggacgggccttgggatgtcattgtcattgggggcgggtattgtgggctgaccgcaacccgtgatttaaccgtcgcagggttcaagacgctgctgctggaggcccgtgatcgtattggtggccgctcctggagcagtaatattgacggttacccgtatgagatgggtggcacttgggttcattggcatcaatctcacgtgtggcgtgaaatcacgcgttataaaatgcacaacgcgctgtctccatcatttaacttttcacgtggcgtgaatcacttccaactgcgtaccaatccgaccaccagtacgtacatgacgcacgaagcggaggatgaactgctgcgtagcgcattgcataaattcaccaatgtcgacggcactaatggccgtacagtgttgccgttcccacatgatatgttttatgtgccggaatttcgcaagtatcgcgaaatgtcatattccgaacgcattgaccagatccgcgacgaactgtctttgaacgaacgctctagtttagaggctttcattttattatgtagcggtggcaccctggaaaactccagctttggtgaatttctgcattggtgggcaatgtcgggttacacgtaccagggctgtatggattgtttaatctcctataaatttaaggatggccagagtgcgttcgcgcgtcgcttctgggaagaagccgctggcactggccgtctgggctatgtctttggttgtccggtgcgttctgtggtggatgaacgcgacgcagtacgtgttaccgcacgtgacggtcgcgaattcgcagcgaaacgtttggtttgcacgattccgctgaacgtattgagttctgttcattttagcccaccactgtccccgcaacgcatggccgctgcgaacatcggccatgttaaccagtgcgtcaaagtgcatgcggaagtcagttgtccggatatgcgttcatggtcgggtatctcctatccgttcaacaaattagcctacgctatcggcgatggcacgaccccagcgggtaatacgcatattgtgtgccttgggggggcccataatcatatccagccggaagaggacgtggaagcaacgaagatggccgttgaaaacatgtcgcctgggaatatggatatcaaacgtctggtcttccacaactggtgcaaggatgaatttgccaaaggcgcgtggttcttcgcccctccacagctgctgtcaaagagcctggatgaactgcgctgccgtcacggtaatgtcctgtttgcaaactccgattgggccttaggttggcgtggttttatcgatggtgctatcgaggagggcacccgcgcagcggttactgtaattgaggaactgcgtcctgcgcctgcggtgcgttcccacctg

SEQ ID NO: 588 - protein, 495 aa, synthetic construct
  REGION 1..495: note = Variant of monoamine oxidase
MTSRDGYQWTPETGLTQGVPSLGVISPPTNIEDTDKDGPWDVIVIGGGYCGLTATRDLTVAGFKTLLLEARDRIGGRSWSSNIDGYPYEMGGTWVHWHQSHVWREITRYKMHNALSPSFNFSRGVNHFQLRTNPTTSTYMTHEAEDELLRSALHKFTNVDGTNGRTVLPFPHDMFYVPEFRKYREMSYSERIDQIRDELSLNERSSLEAFILLCSGGTLENSSFGEFLHWWAMSGYTYQGCMDCLISYKFKDGQSAFARRFWEEAAGTGRLGYVFGCPVRSVVDERDAVRVTARDGREFAAKRLVCTIPLNVLSSVHFSPPLSPQRMAAANIGHVNQCVKVHAEVSCPDMRSWSGISYPFNKLAYAIGDGTTPAGNTHIVCLGGAHNHIQPEEDVEATKMAVENMSPGNMDIKRLVFHNWCKDEFAKGAWFFAPPQLLSKSLDELRCRHGNVLFANSDWALGWRGFIDGAIEEGTRAAVTVIEELRPAPAVRSHL

SEQ ID NO: 589 - DNA, 1485 bp, synthetic construct
  misc_feature 1..1485: note = Variant of monoamine oxidase
  source 1..1485: mol_type = other DNA
atgaccagccgcgacggctatcagtggaccccggaaacgggtctgacccagggcgtaccgtccctgggtgtcatttcgccgccgactaacatcgaagataccgataaggacgggccttgggatgtcattgtcattgggggcgggtattgtgggctgaccgcaacccgtgatttaaccgtcgcagggttcaagacgctgctgctggaggcccgtgatcgtattggtggccgctcctggagcagtaatattgacggttacccgtatgagatgggtggcacctgggttcattggcatcaatctcacgtgtggcgtgaaatcacgcgttataaaatgcacaacgcgctgtctccatcatttaacttttcacgtggcgtgaatcacttccaactgcgtaccaatccgaccaccagtacgtacatgacgcacgaagcggaggatgaactgctgcgtagcgcattgcataaattcaccaatgtcgacggcactaatggccgtacagtgttgccgttcccacatgatatgttttatgtgccggaatttcgcaagtatgatgaaatgtcatattccgaacgcattgaccagatccgcgacgaactgtctttgaacgaacgctctagtttagaggctttcattttattatgtagcggtggcaccctggaaaactccagctttggtgaatttctgcattggtgggcaatgtcgggttacacgcgtcagggctgtatggattgtttaatctcctataaatttaaggatggccagagtgcgttcgcgcgtcgcttctgggaagaagccgctggcactggccgtctgggctatgtctttggttgtccggtgcgttctgtggtgaacgaacgcgacgcagtacgtgttaccgcacgtgacggtcgcgaattcgcagcgaaacgtttggtttgcacgattccgctgaacgtattgagttctgttcattttagcccaccactgtccccgcaacgcatggccgctgcgaacggcggccatgttaaccagtgcgtcaaagtgcatgcggaagtcagttgtccggatatgcgttcatggtcgggtatctcctatccgttcaacaaattagcctacgctatcggcgatggcacgaccccagcgggtaatacgcatattgtgtgccttgggggggcccataatcatatccagccggaagaggacgtggaagcaacgaagatggccgttgaaaacatgtcgcctgggaatatggatatcaaacgtctggtcttccacaactggtgcaaggatgaatttgccaaaggcgggtggttcttcgcccctccacagctgctgtcaaagagcctggatgaactgcgctgccgtcacggtaatgtcctgtttgcaaactccgattgggccttaggttggcgtggttttatcgatggtgctatcgaggagggcacccgcgcagcggttactgtaattgaggaactgcgtcctgcgcctgcggtgcgttcccacctg

SEQ ID NO: 590 - protein, 495 aa, synthetic construct
  REGION 1..495: note = Variant of monoamine oxidase
MTSRDGYQWTPETGLTQGVPSLGVISPPTNIEDTDKDGPWDVIVIGGGYCGLTATRDLTVAGFKTLLLEARDRIGGRSWSSNIDGYPYEMGGTWVHWHQSHVWREITRYKMHNALSPSFNFSRGVNHFQLRTNPTTSTYMTHEAEDELLRSALHKFTNVDGTNGRTVLPFPHDMFYVPEFRKYDEMSYSERIDQIRDELSLNERSSLEAFILLCSGGTLENSSFGEFLHWWAMSGYTRQGCMDCLISYKFKDGQSAFARRFWEEAAGTGRLGYVFGCPVRSVVNERDAVRVTARDGREFAAKRLVCTIPLNVLSSVHFSPPLSPQRMAAANGGHVNQCVKVHAEVSCPDMRSWSGISYPFNKLAYAIGDGTTPAGNTHIVCLGGAHNHIQPEEDVEATKMAVENMSPGNMDIKRLVFHNWCKDEFAKGGWFFAPPQLLSKSLDELRCRHGNVLFANSDWALGWRGFIDGAIEEGTRAAVTVIEELRPAPAVRSHL

SEQ ID NO: 591 - DNA, 1485 bp, synthetic construct
  misc_feature 1..1485: note = Variant of monoamine oxidase
  source 1..1485: mol_type = other DNA
atgaccagccgcgacggctatcagtggaccccggaaacgggtctgacccagggcgtaccgtccctgggtgtcatttcgccgccgactaacatcgaagataccgataaggacgggccttgggatgtcattgtcattgggggcgggtattgtgggctgaccgcaacccgtgatttaaccgtcgcagggttcaagacgctgctgctggaggcccgtgatcgtattggtggccgctcctggagcagtaacattgacggttacccgtatgagatgggtggcacttgggttcattggcatcaatctcacgtgtggcgtgaaatcacgcgttataaaatgcacggcgcgctgtctccgtcatttaacttttcacgtggcgtgaatcacttccaactgcgtaccaatccgaccaccagtacgtacatgacgcacgaagcggaggatgaactgctgcgtagcgcattgcataaattcaccaatgtcgacggcactaatggccgtacagtgttgccgttcccacatgatatgttttatgtgccggaatttcgcaagtatgacgaaatgtcatattccgaacgcattgaccagatccgcgacgaactgtctttgaacgaacgctctagtttagaggctttcattttattatgtagcggtggcaccctggaaaactccagctttggtgaatttctgcattggtgggcaatgtcgggttacacgtatcagggctgtatggattgtttaatctcctataaatttaaggatggccagagtgcgttcgcgcgtcgcttctgggaagaagccgctggcactggccgtctgggctatgtctttggttgtccggtgcgttctgtggtgaacgaacgcgacgcagtacgtgttaccgcacgtgacggtcgcgaattcgcagcgaaacgtttggtttgcacgattccgctgaacgtattgagttctgttcattttagcccaccactgtccccgcaacgcatggccgctgcgaacattggccatgttaaccaggctgtcaaagtgcatgcggaagtcagttgtccggatatgcgttcatggtcgggtatctcctatccgttcaacaaattagcctacgctatcggcgatggcacgaccccagcgggtaatacgcatattgtgtgccttgggggggcccataatcatatccagccggaagaggacgtggaagcaacgaagatggccgttgaaaacatgtcgcctgggaatatggatatcaaacgtctggtcttccataactggagcaaggatgaatttgccaaaggcgcgtggttcttcgcccctccacagctgctgtcaaagagcctggatgaactgcgctgccgtcacggtaatgtcctgtttgcaaactccgattgggccttaggttggcgtggttttatcgatggtgctatcgaggagggcacccgcgcagcggttactgtaattgaggaactgcgtcctgcgcctgcggtgcgttcccacctg

SEQ ID NO: 592 - protein, 495 aa, synthetic construct
  REGION 1..495: note = Variant of monoamine oxidase
MTSRDGYQWTPETGLTQGVPSLGVISPPTNIEDTDKDGPWDVIVIGGGYCGLTATRDLTVAGFKTLLLEARDRIGGRSWSSNIDGYPYEMGGTWVHWHQSHVWREITRYKMHGALSPSFNFSRGVNHFQLRTNPTTSTYMTHEAEDELLRSALHKFTNVDGTNGRTVLPFPHDMFYVPEFRKYDEMSYSERIDQIRDELSLNERSSLEAFILLCSGGTLENSSFGEFLHWWAMSGYTYQGCMDCLISYKFKDGQSAFARRFWEEAAGTGRLGYVFGCPVRSVVNERDAVRVTARDGREFAAKRLVCTIPLNVLSSVHFSPPLSPQRMAAANIGHVNQAVKVHAEVSCPDMRSWSGISYPFNKLAYAIGDGTTPAGNTHIVCLGGAHNHIQPEEDVEATKMAVENMSPGNMDIKRLVFHNWSKDEFAKGAWFFAPPQLLSKSLDELRCRHGNVLFANSDWALGWRGFIDGAIEEGTRAAVTVIEELRPAPAVRSHL

SEQ ID NO: 593 - DNA, 1485 bp, synthetic construct
  misc_feature 1..1485: note = Variant of monoamine oxidase
  source 1..1485: mol_type = other DNA
atgaccagccgcgacggctatcagtggaccccggaaacgggtctgacccagggcgtaccgtccctgggtgtcatttcgccgccgactaacatcgaagataccgataaggacgggccttgggatgtcattgtcattgggggcgggtattgtgggctgaccgcaacccgtgatttaaccgtcgcagggttcaagacgctgctgctggaggcccgtgatcgtattggtggccgctcctggagcagtaatattgacggttacccgtatgagatgggtggcacttgggttcattggcatcaatctcacgtgtggcgtgaaatcacgcgttataaaatgcacggcgcgctgtctccgtcatttaacttttcacgtggcgtgaatcacttccaactgcgtaccaatccgaccaccagtacgtacatgacgcacgaagcggaggatgaactgctgcgtagcgcattgcataaattcaccaatgtcgacggcactaatggccgtacagtgttgccgttcccacatgatatgttttatgtgccggaatttcgcaagtatgacgaaatgtcatattccgaacgcattgaccagatccgcgacgaactgtctttgaacgaacgctctagtttagaggctttcattttattatgtagcggtggcggcctggaaaactccagctttggtgaatttctgcattggtgggcaatgtcgggttacacgtatcagggctgtatggattgtttaatctcctataaatttaaggatggccagagtgcgttcgcgcgtcgcttctgggaagaagccgctggcactggccgtctgggctatgtctttggttgtccggtgcgttctgtggtgaacgaacgcgacgcagtacgtgttaccgcacgtgacggtcgcgaattcgcagcgaaacgtttggtttgcacgattccgctgaacgtattgagttctgttcattttagcccaccactgtccccgcaacgcatggccgctgcgaacattggccatgttaaccagagcgtcaaagtgcatgcggaagtcagttgtccggatatgcgttcatggtcgggtatctcctatccgttcaacaaattagcctacgctatcggcgatggcacgaccccagcgggtaatacgcatattgtgtgccttgggggggcccataatcatatccagccggaagaggacgtggaagcaacgaagatggccgttgaaaacatgtcgcctgggaatatggatatcaaacgtctggtcttccataactggagcaaggatgaatttgccaaaggcgcgtggttcttcgcccctccacagctgctgtcaaagagcctggatgaactgcgctgccgtcacggtaatgtcctgtttgcaaactccgattgggccttaggttggcgtggttttatcgatggtgctatcgaggagggcacccgcgcagcggttactgtaattgaggaactgcgtcctgcgcctgcggtgcgttcccacctg

SEQ ID NO: 594 - protein, 495 aa, synthetic construct
  REGION 1..495: note = Variant of monoamine oxidase
MTSRDGYQWTPETGLTQGVPSLGVISPPTNIEDTDKDGPWDVIVIGGGYCGLTATRDLTVAGFKTLLLEARDRIGGRSWSSNIDGYPYEMGGTWVHWHQSHVWREITRYKMHGALSPSFNFSRGVNHFQLRTNPTTSTYMTHEAEDELLRSALHKFTNVDGTNGRTVLPFPHDMFYVPEFRKYDEMSYSERIDQIRDELSLNERSSLEAFILLCSGGGLENSSFGEFLHWWAMSGYTYQGCMDCLISYKFKDGQSAFARRFWEEAAGTGRLGYVFGCPVRSVVNERDAVRVTARDGREFAAKRLVCTIPLNVLSSVHFSPPLSPQRMAAANIGHVNQSVKVHAEVSCPDMRSWSGISYPFNKLAYAIGDGTTPAGNTHIVCLGGAHNHIQPEEDVEATKMAVENMSPGNMDIKRLVFHNWSKDEFAKGAWFFAPPQLLSKSLDELRCRHGNVLFANSDWALGWRGFIDGAIEEGTRAAVTVIEELRPAPAVRSHL

SEQ ID NO: 595 - DNA, 1485 bp, synthetic construct
  misc_feature 1..1485: note = Variant of monoamine oxidase
  source 1..1485: mol_type = other DNA
atgaccagccgcgacggctatcagtggaccccggaaacgggtctgacccagggcgtaccgtccctgggtgtcatttcgccgccgactaacatcgaagataccgataaggacgggccttgggatgtcattgtcattgggggcgggtattgtgggctgaccgcaacccgtgatttaaccgtcgcagggttcaagacgctgctgctggaggcccgtgatcgtattggtggccgctcctggagcagtaatattgacggttacccgtatgagatgggtggcacttgggttcattggcatcaatctcacgtgtggcgtgaaatcacgcgttataaaatgcacaacgcgctgtctccatcatttaacttttcacgtggcgtgaatcacttccaactgcgtaccaatccgaccaccagtacgtacatgacgcacgaagcggaggatgaactgctgcgtagcgcattgcataaattcaccaatgtcgacggcactaatggccgtacagtgttgccgttcccacatgatatgttttatgtgccggaatttcgcaagtatgatgaaatgtcatattccgaacgcattgaccagatccgcgacgaactgtctttgaacgaacgctctagtttagaggctttcattttattatgtagcggtggcaccctggaaaactccagctttggtgaatttctgcattggtgggcaatgtcgggttacacgtaccagggctgtatggattgtttaatctcctataaatttaaggatggccagagtgcgttcgcgcgtcgcttctgggaagaagccgctggcactggccgtctgggctatgtctttggttgtccggtgcgttctgtggtggatgaacgcgacgcagtacgtgttaccgcacgtgacggtcgcgaattcgcagcgaaacgtttggtttgcacgattccgctgaacgtattgagttctgttcattttagcccaccactgtccccgcaacgcatggccgctgcgaacattggccatgttaaccagtgcgtcaaagtgcatgcggaagtcagttgtccggatatgcgttcatggtcgggtatctcctatccgttcaacaaattagcctacgctatcggcgatggcacgaccccagcgggtaatacgcatattgtgtgccttgggggggccgagaatcatatccagccggaagaggacgtggaagcaacgaagatggccgttgaaaacatgtcgcctgggaatatggatatcaaacgtctggtcttccacaactggtgcaaggatgaatttgccaaaggcgggtggttcttcgcccctccacagctgctgtcaaagagcctggatgaactgcgctgccgtcacggtaatgtcctgtttgcaaactccgattgggccttaggttggcgtggttttatcgatggtgctatcgaggagggcacccgcgcagcggttactgtaattgaggaactgcgtcctgcgcctgcggtgcgttcccacctg

SEQ ID NO: 596 - protein, 495 aa, synthetic construct
  REGION 1..495: note = Variant of monoamine oxidase
MTSRDGYQWTPETGLTQGVPSLGVISPPTNIEDTDKDGPWDVIVIGGGYCGLTATRDLTVAGFKTLLLEARDRIGGRSWSSNIDGYPYEMGGTWVHWHQSHVWREITRYKMHNALSPSFNFSRGVNHFQLRTNPTTSTYMTHEAEDELLRSALHKFTNVDGTNGRTVLPFPHDMFYVPEFRKYDEMSYSERIDQIRDELSLNERSSLEAFILLCSGGTLENSSFGEFLHWWAMSGYTYQGCMDCLISYKFKDGQSAFARRFWEEAAGTGRLGYVFGCPVRSVVDERDAVRVTARDGREFAAKRLVCTIPLNVLSSVHFSPPLSPQRMAAANIGHVNQCVKVHAEVSCPDMRSWSGISYPFNKLAYAIGDGTTPAGNTHIVCLGGAENHIQPEEDVEATKMAVENMSPGNMDIKRLVFHNWCKDEFAKGGWFFAPPQLLSKSLDELRCRHGNVLFANSDWALGWRGFIDGAIEEGTRAAVTVIEELRPAPAVRSHL

SEQ ID NO: 597 - DNA, 1485 bp, synthetic construct
  misc_feature 1..1485: note = Variant of monoamine oxidase
  source 1..1485: mol_type = other DNA
atgaccagccgcgacggctatcagtggaccccggaaacgggtctgacccagggcgtaccgtccctgggtgtcatttcgccgccgactaacatcgaagataccgataaggacgggccttgggatgtcattgtcattgggggcgggtattgtgggctgaccgcaacccgtgatttaaccgtcgcagggttcaagacgctgctgctggaggcccgtgatcgtattggtggccgctcctggagcagtaatattgacggttacccgtatgagatgggtggcacttgggttcattggcatcaatcgcacgtgtggcgtgaaatcacgcgttataaaatgcacaacgcgctgtctccatcatttaacttttcacgtggcgtgaatcacttccaactgcgtaccaatccgaccaccagtacgtacatgacgcacgaagcgggggatgaactgctgcgtagcgcattgcataaattcaccaatgtcgacggcactaatggccgtacagtgttgccgttcccacatgatatgttttatgtgccggaatttcgcaagtatgacgaaatgtcatattccgaacgcattgaccagatccgcgacgaactgtctttgaacgaacgctctagtttagaggctttcattttattatgtagcggtggcaccctggaaaactccagctttggtgaatttctgcattggtgggcaatgtcgggttacacgtatcagggctgtatggattgtttaatttcctataaatttaaggatggccagagagcgttcgcgcgtcgcttctgggaagaagccgctggcactggccgtctgggctatgtctttggttgcccggtgcgttctgtggtgaacgaacgcgacgcagtacgtgttaccgcacgtgacggtcgcgaattcgcagcgaaacgtttggtttgcacgattccgctgaacgtattgagttctgttcattttagcccaccactgtccccgcaacgcatggccgctgcgaacattggccatgttaaccagtgcgtcaaagtgcatgcggaagtcagttgcccagatatgcgttcatggtcgggtatctcctatccgttcaacaaattagcctacgctatcggcgatggcacgaccccagcgggtaatacgcatattgtgtgccttgggggggcccataatcatatccagccggaagaggacgtggaagcaacgaagatggccgttgaaaacatgtcgcctgggaatatggatatcaaacgtctggtcttccacaactggtgcaaggatgaatttgccaaaggcgcgtggttcttcgcccctccacagctgctgtcaaagagcctggatgaactgcgctgtcgtcacggtaatgtcctgtttgcaaactccgattgggccttaggttggcgtggttttatcgatggtgctatcgaggagggcacccgcgcagcggttactgtaattgaggaactgcgtcctgcgcctgcggtgcgttcccacctg

SEQ ID NO: 598 - protein, 495 aa, synthetic construct
  REGION 1..495: note = Variant of monoamine oxidase
MTSRDGYQWTPETGLTQGVPSLGVISPPTNIEDTDKDGPWDVIVIGGGYCGLTATRDLTVAGFKTLLLEARDRIGGRSWSSNIDGYPYEMGGTWVHWHQSHVWREITRYKMHNALSPSFNFSRGVNHFQLRTNPTTSTYMTHEAGDELLRSALHKFTNVDGTNGRTVLPFPHDMFYVPEFRKYDEMSYSERIDQIRDELSLNERSSLEAFILLCSGGTLENSSFGEFLHWWAMSGYTYQGCMDCLISYKFKDGQRAFARRFWEEAAGTGRLGYVFGCPVRSVVNERDAVRVTARDGREFAAKRLVCTIPLNVLSSVHFSPPLSPQRMAAANIGHVNQCVKVHAEVSCPDMRSWSGISYPFNKLAYAIGDGTTPAGNTHIVCLGGAHNHIQPEEDVEATKMAVENMSPGNMDIKRLVFHNWCKDEFAKGAWFFAPPQLLSKSLDELRCRHGNVLFANSDWALGWRGFIDGAIEEGTRAAVTVIEELRPAPAVRSHL

SEQ ID NO: 599 - DNA, 1485 bp, synthetic construct
  misc_feature 1..1485: note = Variant of monoamine oxidase
  source 1..1485: mol_type = other DNA
atgaccagccgcgacggctatcagtggaccccggaaacgggtctgacccagggcgtaccgtccctgggtgtcatttcgccgccgactaacatcgaagataccgataaggacgggccttgggatgtcattgtcattgggggcgggtattgtgggctgaccgcaacccgtgatttaaccgtcgcagggttcaagacgctgctgctggaggcccgtgatcgtattggtggccgctcctggagcagtaatattgacggttacccgtatgagatgggtggcacttgggttcattggcatcaatcgcacgtgtggcgtgaaatcacgcgttataaaatgcacaacgcgctgtctccatcatttaacttttcacgtggcgtgaatcacttccaactgcgtaccaatccgaccaccagtacgtacatgacgcacgaagcgggggatgaactgatgcgtagcgcattgcataaattcaccaatgtcgacggcactaatggccgtacagtgttgccgttcccacatgatatgttttatgtgccggaatttcgcaagtatgacgaaatgtcatattccgaacgcattgaccagatccgcgacgatctgtctttgaacgaacgctctagtttagaggctttcattttattatgtagcggtggcaccctggaaaactccagctttggtgaatttctgcattggtgggcaatgtcgggttacacgtatcagggctgtatggattgtttaatctcctataaatttaaggatggccagagtgcgttcgcgcgtcgcttctgggaagaagccgctggcactggccgtctgggctatgtctttggttgcccggtgcgttctgtggtgaacgaacgcgacgcagtacgtgttaccgcacgtgacggtcgcgaattcgcagcgaaacgtttggtttgcacgattccgctgaacgtattgagttctgttcattttagcccaccactgtccccgcaacgcatggccgctgcgaacattggccatgttaaccagtgcgtcaaagtgcatgcggaagtcagtaacccagatatgcgttcatggtcgggtatctcctatccgttcaacaaattagcctacgctatcggcgatggcacgaccccagcgggtaatacgcatattgtgtgccttgggggggcccataatcatatccagccggaagaggacgtggaagcaacgaagatggccgttgaaaacatgtcgcctgggaatatggatatcaaacgtctggtcttccacaactggtgcaaggatgaatttgccaaaggcgcgtggttcttcgcccctccacagctgctgtcaaagagcctggatgaactgcgcgcacgtcacggtaatgtcctgtttgcaaactccgattgggccttaggttggcgtggttttatcgatggtgctatcgaggagggcacccgcgcagcggttactgtaattgaggaactgcgtcctgcgcctgcggtgcgttcccacctg

SEQ ID NO: 600 - protein, 495 aa, synthetic construct
  REGION 1..495: note = Variant of monoamine oxidase
MTSRDGYQWTPETGLTQGVPSLGVISPPTNIEDTDKDGPWDVIVIGGGYCGLTATRDLTVAGFKTLLLEARDRIGGRSWSSNIDGYPYEMGGTWVHWHQSHVWREITRYKMHNALSPSFNFSRGVNHFQLRTNPTTSTYMTHEAGDELMRSALHKFTNVDGTNGRTVLPFPHDMFYVPEFRKYDEMSYSERIDQIRDDLSLNERSSLEAFILLCSGGTLENSSFGEFLHWWAMSGYTYQGCMDCLISYKFKDGQSAFARRFWEEAAGTGRLGYVFGCPVRSVVNERDAVRVTARDGREFAAKRLVCTIPLNVLSSVHFSPPLSPQRMAAANIGHVNQCVKVHAEVSNPDMRSWSGISYPFNKLAYAIGDGTTPAGNTHIVCLGGAHNHIQPEEDVEATKMAVENMSPGNMDIKRLVFHNWCKDEFAKGAWFFAPPQLLSKSLDELRARHGNVLFANSDWALGWRGFIDGAIEEGTRAAVTVIEELRPAPAVRSHL

SEQ ID NO: 601 - DNA, 1485 bp, synthetic construct
  misc_feature 1..1485: note = Variant of monoamine oxidase
  source 1..1485: mol_type = other DNA
atgaccagccgcgacggctatcagtggaccccggaaacgggtctgacccagggcgtaccgtccctgggtgtcatttcgccgccgactaacatcgaagataccgataaggacgggccttgggatgtcattgtcattgggggcgggtattgtgggctgaccgcaacccgtgatttaaccgtcgcagggttcaagacgctgctgctggaggcccgtgatcgtattggtggccgctcctggagcagtaatattgacggttacccgtatgagatgggtggcacttgggttcattggcatcaatcgcacgtgtggcgtgaaatcacgcgttataaaatgcacaacgcgctgtctccatcatttaacttttcacgtggcgtgaatcacttccaactgcgtaccaatccgaccaccagtacgtacatgacgcacgaagcgggggctgaactgatgcgtagcgcattgcataaattcaccaatgtcgacggcactaatggccgtacagtgttgccgttcccacatgatatgttttatgtgccggaatttcgcaagtatgacgaaatgtcatattccgaacgcattgaccagatccgcgacgaactgtctttgaacgaacgctctagtttagaggctttcattttattatgtagcggtggcaccctggaaaactccagctttggtgaatttctgcattggtgggcaatgtcgggttacacgtatcagggctgtatggattgtttaatctcctataaatttaaggatggccagagtgcgttcgcgcgtcgcttctgggaagaagccgctggcactggccgtctgggctatgtctttggtactccggtgcgttctgtggtgaacgaacgcgacgcagtacgtgttaccgcacgtgacggtcgcgaattcgcagcgaaacgtttggtttgcacgattccgctgaacgtattgagttctgttcattttagcccaccactgtccccgcaacgcatggccgctgcgaacattggccatgttaaccagtgcgtcaaagtgcatgcggaagtcagtgacccagatatgcgttcatggtcgggtatctcctatccgttcaacaaattagcctacgctatcggcgatggcacgaccccagcgggtaatacgcatattgtgtgccttgggggggcccataatcatatccagccggaagaggacgtggaagcaacgaagatggccgttgaaaacatgtcgcctgggaatatggatatcaaacgtctggtcttccacaactggtgcaaggatgaatttgccaaaggcgcgtggttcttcgcccctccacagctgctgtcaaagagcctggatgaactgcgctgtcgtcacggtaatgtcctgtttgcaaactccgattgggccttaggttggcgtggttttatcgatggtgctatcgaggagggcacccgcgcagcggttactgtaattgaggaactgcgtcctgcgcctgcggtgcgttcccacctg

SEQ ID NO: 602 - protein, 495 aa, synthetic construct
  REGION 1..495: note = Variant of monoamine oxidase
MTSRDGYQWTPETGLTQGVPSLGVISPPTNIEDTDKDGPWDVIVIGGGYCGLTATRDLTVAGFKTLLLEARDRIGGRSWSSNIDGYPYEMGGTWVHWHQSHVWREITRYKMHNALSPSFNFSRGVNHFQLRTNPTTSTYMTHEAGAELMRSALHKFTNVDGTNGRTVLPFPHDMFYVPEFRKYDEMSYSERIDQIRDELSLNERSSLEAFILLCSGGTLENSSFGEFLHWWAMSGYTYQGCMDCLISYKFKDGQSAFARRFWEEAAGTGRLGYVFGTPVRSVVNERDAVRVTARDGREFAAKRLVCTIPLNVLSSVHFSPPLSPQRMAAANIGHVNQCVKVHAEVSDPDMRSWSGISYPFNKLAYAIGDGTTPAGNTHIVCLGGAHNHIQPEEDVEATKMAVENMSPGNMDIKRLVFHNWCKDEFAKGAWFFAPPQLLSKSLDELRCRHGNVLFANSDWALGWRGFIDGAIEEGTRAAVTVIEELRPAPAVRSHL

SEQ ID NO: 603 - DNA, 1485 bp, synthetic construct
  misc_feature 1..1485: note = Variant of monoamine oxidase
  source 1..1485: mol_type = other DNA
atgaccagccgcgacggctatcagtggaccccggaaacgggtctgacccagggcgtaccgtccctgggtgtcatttcgccgccgactaacatcgaagataccgataaggacgggccttgggatgtcattgtcattgggggcgggtattgtgggctgaccgcaacccgtgatttaaccgtcgcagggttcaagacgctgctgctggaggcccgtgatcgtattggtggccgctcctgggtgagtaatattgacggttacccgtatgagatgggtggcacttgggttcattggcatcaatctcacgtgtggcgtgaaatcacgcgttataaaatgcacaacgcgctgtctccatcatttaacttttcacgtggcgtgaatcacttccaactgcgtaccaatccgaccaccagtacgtacatgacgcacgaagcggaggatgaactgctgcgtagcgcattgcataaattcaccaatgtcgacggcactaatggccgtacagtgttgccgttcccacatgatatgttttatgtgccggaatttcgcaagtatgacgaaatgtcatattccgaacgcattgaccagatccgcgacgaactgtctttgaacgaacgctctagtttagaggctttcattttattatgtagcggtggcaccctggaaaactccagctttggtgaatttctgcattggtgggcaatgtcgggttactcgtaccagggctgtatggattgtttaatctcctataaatttaaggatggccagagtgcgttcgcgcgtcgcttctgggaagaagccgctggcactggccgtctgggctatgtctttggttgtccggtgcgttctgtggtgaacgaacgcgacgcagtacgtgttaccgcacgtgacggtcgcgaattcgcagcgaaacgtttggtttgcacgattccgctgaacgtattgagttctgttcattttagcccaccactgtccccgcaacgcatggccgctgcgaacggcggccatgttaaccagtgcgtcaaagtgcatgcggaagtcagttgtccggatatgcgttcatggtcgggtatctcctatccgttcaacaaattagcctacgctatcggcgatggcacgaccccagcgggtaatacgcatattgtgtgccttgggggggcccataatcatatccagccggaagaggacgtggaagcaacgaagatggccgttgaaaacatgtcgcctgggaatatggatatcaaacgtctggtcttccacaactggtgcaaggatgaatttgccaaaggcgcgtggttcttcgcccctccacagctgctgtcaaagagcctggatgaactgcgctgccgtcacggtaatgtcctgtttgcaaactccgattgggccttaggttggcgtggttttatcgatggtgctatcgaggagggcacccgcgcagcggttactgtaattgaggaactgcgtcctgcgcctgcggtgcgttcccacctg

SEQ ID NO: 604 - protein, 495 aa, synthetic construct
  REGION 1..495: note = Variant of monoamine oxidase
MTSRDGYQWTPETGLTQGVPSLGVISPPTNIEDTDKDGPWDVIVIGGGYCGLTATRDLTVAGFKTLLLEARDRIGGRSWVSNIDGYPYEMGGTWVHWHQSHVWREITRYKMHNALSPSFNFSRGVNHFQLRTNPTTSTYMTHEAEDELLRSALHKFTNVDGTNGRTVLPFPHDMFYVPEFRKYDEMSYSERIDQIRDELSLNERSSLEAFILLCSGGTLENSSFGEFLHWWAMSGYSYQGCMDCLISYKFKDGQSAFARRFWEEAAGTGRLGYVFGCPVRSVVNERDAVRVTARDGREFAAKRLVCTIPLNVLSSVHFSPPLSPQRMAAANGGHVNQCVKVHAEVSCPDMRSWSGISYPFNKLAYAIGDGTTPAGNTHIVCLGGAHNHIQPEEDVEATKMAVENMSPGNMDIKRLVFHNWCKDEFAKGAWFFAPPQLLSKSLDELRCRHGNVLFANSDWALGWRGFIDGAIEEGTRAAVTVIEELRPAPAVRSHL

SEQ ID NO: 605 - DNA, 1485 bp, synthetic construct
  misc_feature 1..1485: note = Variant of monoamine oxidase
  source 1..1485: mol_type = other DNA
atgaccagccgcgacggctatcagtggaccccggaaacgggtctgacccagggcgtaccgtccctgggtgtcatttcgccgccgactaacatcgaagataccgataaggacgggccttgggatgtcattgtcattgggggcgggtattgtgggctgaccgcaacccgtgatttaaccgtcgcagggttcaagacgctgctgctggaggcccgtgatcgtattggtggccgctcctggcacagtaatattgacggttacccgtatgagatgggtggcacttgggttcattggcatcaatctcacgtgtggcgtgaaatcacgcgttataaaatgcacaacgcgctgtctccatcatttaacttttcacgtggcgtgaatcacttccaactgcgtaccaatccgaccaccagtacgtacatgacgcacgaagcggaggatgaactgctgcgtagcgcattgcataaattcaccaatgtcgacggcactaatggccgtacagtgttgccgttcccacatgatatgttttatgtgccggaatttcgcaagtatgacgaaatgtcatattccgaacgcattgaccagatccgcgacgaactgtctttgaacgaacgctctagtttagaggctttcattttattatgtagcggtggcaccctggaaaactccagctttggtgaatttctgcattggtgggcaatgtcgggttacacgtaccagggctgtatggattgtttaatctcctataaatttaaggatggccagagtgcgttcgcgcgtcgcttctgggaagaagccgctggcactggccgtctgggctatgtctttggttgtccggtgcgttctgtggtgaacgaacgcgacgcagtacgtgttaccgcacgtgacggtcgcgaattcgcagcgaaacgtttggtttgcacgattccgctgaacgtattgagttctgttcattttagcccaccactgtccccgcaacgcatggccgctgcgaacattggccatgttaaccagtgcgtcaaagtgcatgcggaagtcagttgtccggatatgcgttcatggtcgggtatctcctatccgttcaacaaattagcctacgctatcggcgatggcacgaccccagcgggtaatacgcatattgtggcgcttgggggggcccataatcatatccagccggaagaggacgtggaagcaacgaagatggccgttgaaaacatgtcgcctgggaatatggatatcaaacgtctggtcttccacaactggtgcaaggatgaatttgccaaaggcgcgtggttcttcgcccctccacagctgctgtcaaagagcctggatgaactgcgctgccgtcacggtaatgtcctgtttgcaaactccgattgggccttaggttggcgtggttttatcgatggtgctatcgaggagggcacccgcgcagcggttactgtaattgaggaactgcgtcctgcgcctgcggtgcgttcccacctg

SEQ ID NO: 606 - protein, 495 aa, synthetic construct
  REGION 1..495: note = Variant of monoamine oxidase
MTSRDGYQWTPETGLTQGVPSLGVISPPTNIEDTDKDGPWDVIVIGGGYCGLTATRDLTVAGFKTLLLEARDRIGGRSWHSNIDGYPYEMGGTWVHWHQSHVWREITRYKMHNALSPSFNFSRGVNHFQLRTNPTTSTYMTHEAEDELLRSALHKFTNVDGTNGRTVLPFPHDMFYVPEFRKYDEMSYSERIDQIRDELSLNERSSLEAFILLCSGGTLENSSFGEFLHWWAMSGYTYQGCMDCLISYKFKDGQSAFARRFWEEAAGTGRLGYVFGCPVRSVVNERDAVRVTARDGREFAAKRLVCTIPLNVLSSVHFSPPLSPQRMAAANIGHVNQCVKVHAEVSCPDMRSWSGISYPFNKLAYAIGDGTTPAGNTHIVALGGAHNHIQPEEDVEATKMAVENMSPGNMDIKRLVFHNWCKDEFAKGAWFFAPPQLLSKSLDELRCRHGNVLFANSDWALGWRGFIDGAIEEGTRAAVTVIEELRPAPAVRSHL

SEQ ID NO: 607 - DNA, 1485 bp, synthetic construct
  misc_feature 1..1485: note = Variant of monoamine oxidase
  source 1..1485: mol_type = other DNA
atgaccagccgcgacggctatcagtggaccccggaaacgggtctgacccagggcgtaccgtccctgggtgtcatttcgccgccgactaacatcgaagataccgataaggacgggccttgggatgtcattgtcattgggggcgggtattgtgggctgaccgcaacccgtgatttaaccgtcgcagggttcaagacgctgctgctggaggcccgtgatcgtattggtggccgctcctggagcagtaatattgacggttacccgtatgagatgggtggcacttgggttcattggcatcaaccgcacgtgtggcgtgaaatcacgcgttataaaatgcacaacgcgctgtctccatcatttaacttttcacgtggcgtgaatcacttccaactgcgtaccaatccgaccaccagtacgtacatgacgcacgaagcggaggctgaactgctgcgtagcgctttgcataaattcaccaatgtcgacggcactaatggccgtacagtgttgccgttcccacatgatatgttttatgtgccggaatttcgcaagtatgacgaaatgtcatattccgaacgcattgaccagatccgcgacgatctgtctttgaacgaacgctctagtttagaggctttcattttattatgtagcggtggcaccctggaaaactccagctttggtgaatttctgcattggtgggcaatgtcgggttacacgtatcagggctgtatggattgtttaatctcctataaatttaaggatggccagagtgcgttcgcgcgtcgcttctgggaagaagccgctggcactggccgtctgggctatgtctttggttgtccggtgcgttctgtggtgaacgaacgcgacgcagtacgtgttaccgcacgtgacggtcgcgaattcgcagcgaaacgtttggtttgcacgattccgctgaacgtattgagttctgttcattttagcccaccactgtccccgcaacgcatggccgctgcgaacattggccatgttaaccagtgcgtcaaagtgcatgcggaagtcagttgtccggatatgcgttcatggtcgggtatctcctatccgttcaacaaattagcctacgctatcggcgatggcacgaccccagcgggtaatacgcatattgtgtgccttgggggggcccataatcatatccagccggaagaggacgtggaagcaacgaagatggccgttgaaaacatgtcgcctgggaatatggatatcaaacgtctggtcttccacaactggtgcaaggatgaatttgccaaaggcgcgtggttcttcgcccctccacagctgctgtcaaagagcctggatgaacgtcgctgtcgtcacggtaatgtcctgtttgcaaactccgattgggccttaggttggcgtggttttatcgatggtgctatcgaggagggcacccgcgcagcggttactgtaattgaggaactgcgtcctgcgcctgcggtgcgttcccacctg

SEQ ID NO: 608 - protein, 495 aa, synthetic construct
  REGION 1..495: note = Variant of monoamine oxidase
MTSRDGYQWTPETGLTQGVPSLGVISPPTNIEDTDKDGPWDVIVIGGGYCGLTATRDLTVAGFKTLLLEARDRIGGRSWSSNIDGYPYEMGGTWVHWHQPHVWREITRYKMHNALSPSFNFSRGVNHFQLRTNPTTSTYMTHEAEAELLRSALHKFTNVDGTNGRTVLPFPHDMFYVPEFRKYDEMSYSERIDQIRDDLSLNERSSLEAFILLCSGGTLENSSFGEFLHWWAMSGYTYQGCMDCLISYKFKDGQSAFARRFWEEAAGTGRLGYVFGCPVRSVVNERDAVRVTARDGREFAAKRLVCTIPLNVLSSVHFSPPLSPQRMAAANIGHVNQCVKVHAEVSCPDMRSWSGISYPFNKLAYAIGDGTTPAGNTHIVCLGGAHNHIQPEEDVEATKMAVENMSPGNMDIKRLVFHNWCKDEFAKGAWFFAPPQLLSKSLDERRCRHGNVLFANSDWALGWRGFIDGAIEEGTRAAVTVIEELRPAPAVRSHL

SEQ ID NO: 609 - DNA, 1485 bp, synthetic construct
  misc_feature 1..1485: note = Variant of monoamine oxidase
  source 1..1485: mol_type = other DNA
atgaccagccgcgacggctatcagtggaccccggaaacgggtctgacccagggcgtaccgtccctgggtgtcatttcgccgccgactaacatcgaagataccgataaggacgggccttgggatgtcattgtcattgggggcgggtattgtgggctgaccgcaacccgtgatttaaccgtcgcagggttcaagacgctgctgctggaggcccgtgatcgtattggtggccgctcctggcacagtaatattgacggttacccgtatgagatgggtggcacttgggttcattggcatcaatctcacgtgtggcgtgaaatcacgcgttataaaatgcacaacgcgctgtctccatcatttaacttttcacgtggcgtgaatcacttccaactgcgtaccaatccgaccaccagtacgtacatgacgcacgaagcggaggatgaactgctgcgtagcgcattgcataaattcaccaatgtcgacggcactaatggccgtacagtgttgccgttcccacatgatatgttttatgtgccggaatttcgcaagtatgatgaaatgtcatattccgaacgcattgaccagatccgcgacgaactgtctttgaacgaacgctctagtttagaggctttcattttattatgtagcggtggcaccctggaaaactccagctttggtgaatttctgcattggtgggcaatgtcgggttacacgtatcagggctgtatggattgtttaatctcctataaatttaaggatggccagagtgcgttcgcgcgtcgcttctgggaagaagccgctggcactggccgtctgggctatgtctttggttgtccggtgcgttctgtggtgaacgaacgcgacgcagtacgtgttaccgcacgtgacggtcgcgaattcgcagcgaaacgtttggtttgcacgattccgctgaacgtattgagttctgttcattttagcccaccactgtccccgcaacgcatggccgctgcgaacggcggccatgttaaccagtgcgtcaaagtgcatgcggaagtcagttgtccggatatgcgttcatggtcgggtatctcctatccgttcaacaaattagcctacgctatcggcgatggcacgaccccagcgggtaatacgcatattgtggcgcttgggggggccgagaatcatatccagccggaagaggacgtggaagcaacgaagatggccgttgaaaacatgtcgcctgggaatatggatatcaaacgtctggtcttccacaactggtgcaaggatgaatttgccaaaggcgcgtggttcttcgcccctccacagctgctgtcaaagagcctggatgaactgcgctgccgtcacggtaatgtcctgtttgcaaactccgattgggccttaggttggcgtggttttatcgatggtgctatcgaggagggcacccgcgcagcggttactgtaattgaggaactgcgtcctgcgcctgcggtgcgttcccacctg

SEQ ID NO: 610 - protein, 495 aa, synthetic construct
  REGION 1..495: note = Variant of monoamine oxidase
MTSRDGYQWTPETGLTQGVPSLGVISPPTNIEDTDKDGPWDVIVIGGGYCGLTATRDLTVAGFKTLLLEARDRIGGRSWHSNIDGYPYEMGGTWVHWHQSHVWREITRYKMHNALSPSFNFSRGVNHFQLRTNPTTSTYMTHEAEDELLRSALHKFTNVDGTNGRTVLPFPHDMFYVPEFRKYDEMSYSERIDQIRDELSLNERSSLEAFILLCSGGTLENSSFGEFLHWWAMSGYTYQGCMDCLISYKFKDGQSAFARRFWEEAAGTGRLGYVFGCPVRSVVNERDAVRVTARDGREFAAKRLVCTIPLNVLSSVHFSPPLSPQRMAAANGGHVNQCVKVHAEVSCPDMRSWSGISYPFNKLAYAIGDGTTPAGNTHIVALGGAENHIQPEEDVEATKMAVENMSPGNMDIKRLVFHNWCKDEFAKGAWFFAPPQLLSKSLDELRCRHGNVLFANSDWALGWRGFIDGAIEEGTRAAVTVIEELRPAPAVRSHL

SEQ ID NO: 611 - DNA, 1485 bp, synthetic construct
  misc_feature 1..1485: note = Variant of monoamine oxidase
  source 1..1485: mol_type = other DNA
atgaccagccgcgacggctatcagtggaccccggaaacgggtctgacccagggcgtaccgtccctgggtgtcatttcgccgccgactaacatcgaagataccgataaggacgggccttgggatgtcattgtcattgggggcgggtattgtgggctgaccgcaacccgtgatttaaccgtcgcagggttcaagacgctgctgctggaggcccgtgatcgtattggtggccgctcctgggtgagtaatattgacggttacccgtatgagatgggtggcacttgggttcattggcatcaatctcacgtgtggcgtgaaatcacgcgttataaaatgcacaacgcgctgtctccatcatttaacttttcacgtggcgtgaatcacttccaactgcgtaccaatccgaccaccagtacgtacatgacgcacgaagcggaggatgaactgctgcgtagcgcattgcataaattcaccaatgtcgacggcactaatggccgtacagtgttgccgttcccacatgatatgttttatgtgccggaatttcgcaagtatgacgaaatgtcatattccgaacgcattgaccagatccgcgacgaactgtctttgaacgaacgctctagtttagaggctttcattttattatgtagcggtggcaccctggaaaactccagctttggtgaatttctgcattggtgggcaatgtcgggttacacgtaccagggctgtatggattgtttaatctcctataaatttaaggatggccagagtgcgttcgcgcgtcgcttctgggaagaagccgctggcactggccgtctgggctatgtctttggttgtccggtgcgttctgtggtgaacgaacgcgacgcagtacgtgttaccgcacgtgacggtcgcgaattcgcagcgaaacgtttggtttgcacgattccgctgaacgtattgagttctgttcattttagcccaccactgtccccgcaacgcatggccgctgcgaacggcggccatgttaaccagtgcgtcaaagtgcatgcggaagtcagttgtccggatatgcgttcatggtcgggtatctcctatccgttcaacaaattagcctacgctatcggcgatggcacgaccccagcgggtaatacgcatattgtgtgccttgggggggcccataatcatatccagccggaagaggacgtggaagcaacgaagatggccgttgaaaacatgtcgcctgggaatatggatatcaaacgtctggtcttccacaactggtgcaaggatgaatttgccaaaggcgcgtggttcttcgcccctccacagctgctgtcaaagagcctggatgaactgcgctgccgtcacggtaatgtcctgtttgcaaactccgattgggccttaggttggcgtggttttatcgatggtgctatcgaggagggcacccgcgcagcggttactgtaattgaggaactgcgtcctgcgcctgcggtgcgttcccacctg

SEQ ID NO: 612 - protein, 495 aa, synthetic construct
  REGION 1..495: note = Variant of monoamine oxidase
MTSRDGYQWTPETGLTQGVPSLGVISPPTNIEDTDKDGPWDVIVIGGGYCGLTATRDLTVAGFKTLLLEARDRIGGRSWVSNIDGYPYEMGGTWVHWHQSHVWREITRYKMHNALSPSFNFSRGVNHFQLRTNPTTSTYMTHEAEDELLRSALHKFTNVDGTNGRTVLPFPHDMFYVPEFRKYDEMSYSERIDQIRDELSLNERSSLEAFILLCSGGTLENSSFGEFLHWWAMSGYTYQGCMDCLISYKFKDGQSAFARRFWEEAAGTGRLGYVFGCPVRSVVNERDAVRVTARDGREFAAKRLVCTIPLNVLSSVHFSPPLSPQRMAAANGGHVNQCVKVHAEVSCPDMRSWSGISYPFNKLAYAIGDGTTPAGNTHIVCLGGAHNHIQPEEDVEATKMAVENMSPGNMDIKRLVFHNWCKDEFAKGAWFFAPPQLLSKSLDELRCRHGNVLFANSDWALGWRGFIDGAIEEGTRAAVTVIEELRPAPAVRSHL

SEQ ID NO: 613 - DNA, 1485 bp, synthetic construct
  misc_feature 1..1485: note = Variant of monoamine oxidase
  source 1..1485: mol_type = other DNA
atgaccagccgcgacggctatcagtggaccccggaaacgggtctgacccagggcgtaccgtccctgggtgtcatttcgccgccgactaacatcgaagataccgataaggacgggccttgggatgtcattgtcattgggggcgggtattgtgggctgaccgcaacccgtgatttaaccgtcgcagggttcaagacgctgctgctggaggcccgtgatcgtattggtggccgctcctggagcagtaatattgacggttacccgtatgagatgggtggcacttgggttcattggcatcaaccgcacgtgtggcgtgaaatcacgcgttataaaatgcacaacgcgctgtctccatcatttaacttttcacgtggcgtgaatcacttccaactgcgtaccaatccgaccaccagtacgtacatgacgcacgaagcgggggctgaactgatgcgtagcgcattgcataaattcaccaatgtcgacggcactaatggccgtacagtgttgccgttcccacatgatatgttttatgtgccggaatttcgcaagtatgacgaaatgtcatattccgaacgcattgaccagatccgcgacgaactgtctttgaacgaacgctctagtttagaggctttcattttattatgtagcggtggcaccctggaaaactccagctttggtgaatttctgcattggtgggcaatgtcgggttacacgtatcagggctgtatggattgtttaatctcctataaagttaaggatggccagagtgcgttcgcgcgtcgcttctgggaagaagccgctggcactggccgtctgggctatgtctttggtactccggtgcgttctgtggtgaacgaacgcgacgcagtacgtgttaccgcacgtgacggtcgcgaattcgcagcgaaacgtttggtttgcacgattccgctgaacgtattgagttctgttcattttagcccaccactgtccccgcaacgcatggccgctgcgaacattggccatgttaaccagtgcgtcaaagtgcatgcggaagtcagtaacaaggatatgcgttcatggtcgggtatctcctatccgttcaacaaattagcctacgctatcggcgatggcacgaccccagcgggtaatacgcatattgtgtgccttgggggggcccataatcatatccagccggaagaggacgtggaagcaacgaagatggccgttgaaaacatgtcgcctgggaatatggatatcaaacgtctggtcttccacaactggtgcaaggatgaatttgccaaaggcgcgtggttcttcgcccctccacagctgctgtcaaagagcctggatgaactgcgcgcacgtcacggtaatgtcctgtttgcaaactccgattgggccttaggttggcgtggttttatcgatggtgctatcgaggagggcacccgcgcagcggttactgtaattgaggaactgcgtcctgcgcctgcggtgcgttcccacctg

SEQ ID NO: 614 - protein, 495 aa, synthetic construct
  REGION 1..495: note = Variant of monoamine oxidase
MTSRDGYQWTPETGLTQGVPSLGVISPPTNIEDTDKDGPWDVIVIGGGYCGLTATRDLTVAGFKTLLLEARDRIGGRSWSSNIDGYPYEMGGTWVHWHQPHVWREITRYKMHNALSPSFNFSRGVNHFQLRTNPTTSTYMTHEAGAELMRSALHKFTNVDGTNGRTVLPFPHDMFYVPEFRKYDEMSYSERIDQIRDELSLNERSSLEAFILLCSGGTLENSSFGEFLHWWAMSGYTYQGCMDCLISYKVKDGQSAFARRFWEEAAGTGRLGYVFGTPVRSVVNERDAVRVTARDGREFAAKRLVCTIPLNVLSSVHFSPPLSPQRMAAANIGHVNQCVKVHAEVSNKDMRSWSGISYPFNKLAYAIGDGTTPAGNTHIVCLGGAHNHIQPEEDVEATKMAVENMSPGNMDIKRLVFHNWCKDEFAKGAWFFAPPQLLSKSLDELRARHGNVLFANSDWALGWRGFIDGAIEEGTRAAVTVIEELRPAPAVRSHL

SEQ ID NO: 615 - DNA, 1485 bp, synthetic construct
  misc_feature 1..1485: note = Variant of monoamine oxidase
  source 1..1485: mol_type = other DNA
atgaccagccgcgacggctatcagtggaccccggaaacgggtctgacccagggcgtaccgtccctgggtgtcatttcgccgccgactaacatcgaagataccgataaggacgggccttgggatgtcattgtcattgggggcgggtattgtgggctgaccgcaacccgtgatttaaccgtcgcagggttcaagacgctgctgctggaggcccgtgatcgtattggtggccgctcctggagcagtaatattgacggttacccgtatgagatgggtggcacttgggttcattggcatcaatctcacgtgtggcgtgaaatcacgcgttataaaatgcacaacgcgctgtctccatcatttaacttttcacgtggcgtgaatcacttccaactgcgtaccaatccgaccaccagtacgtacatgacgcacgaagcggaggatgaactgctgcgtagcgcattgcataaattcaccaatgtcgacggcactaatggccgtacagtgttgccgttcccacatgatatgttttatgtgccggaatttcgcaagtatgacgaaatgtcatattccgaacgcattgaccagatccgcgacgaactgtctttgaacgaacgctctagtttagaggctttcattttattatgtagcggtggcacctcggaaaactccagctttggtgaatttctgcattggtgggcaatgtcgggttacacgtatcagggctgtatggattgtttaatctcctataaatttaaggatggccagagtgcgttcgcgcgtcgcttctgggaagaagccgctggcactggccgtctgggctatgtctttggttgtccggtgcgttctgtggtgaacgaacgcgacgcagtacgtgttaccgcacgtgacggtcgcgaattcgcagcgaaacgtttggtttgcacgattccgctgaacgtattgagttctgttcattttagcccaccactgtccccgcaacgcatggccgctgcgaacattggccatgttaaccaggctgtcaaagtgcatgcggaagtcagttgtccggatatgcgttcatggtcgggtatctcctatccgttcaacaaattagcctacgctatcggcgatggcacgaccccagcgggtaatacgcatattgtgtgccttgggggggcccataatcatatccagccggaagaggacgtggaagcaacgaagatggccgttgaaaacatgtcgcctgggaatatggatatcaaacgtctggtcttcgggaactggtgcaaggatgaatttgccaaaggcgcgtggttcttcgcccctccacagctgctgtcaaagagcctggatgaactgcgctgccgtcacggtaatgtcctgtttgcaaactccgattgggccttaggttggcgtggttttatcgatggtgctatcgaggagggcacccgcgcagcggttactgtaattgaggaactgcgtcctgcgcctgcggtgcgttcccacctg

SEQ ID NO: 616 - protein, 495 aa, synthetic construct
  REGION 1..495: note = Variant of monoamine oxidase
MTSRDGYQWTPETGLTQGVPSLGVISPPTNIEDTDKDGPWDVIVIGGGYCGLTATRDLTVAGFKTLLLEARDRIGGRSWSSNIDGYPYEMGGTWVHWHQSHVWREITRYKMHNALSPSFNFSRGVNHFQLRTNPTTSTYMTHEAEDELLRSALHKFTNVDGTNGRTVLPFPHDMFYVPEFRKYDEMSYSERIDQIRDELSLNERSSLEAFILLCSGGTSENSSFGEFLHWWAMSGYTYQGCMDCLISYKFKDGQSAFARRFWEEAAGTGRLGYVFGCPVRSVVNERDAVRVTARDGREFAAKRLVCTIPLNVLSSVHFSPPLSPQRMAAANIGHVNQAVKVHAEVSCPDMRSWSGISYPFNKLAYAIGDGTTPAGNTHIVCLGGAHNHIQPEEDVEATKMAVENMSPGNMDIKRLVFGNWCKDEFAKGAWFFAPPQLLSKSLDELRCRHGNVLFANSDWALGWRGFIDGAIEEGTRAAVTVIEELRPAPAVRSHL

SEQ ID NO: 617 - DNA, 1485 bp, synthetic construct
  misc_feature 1..1485: note = Variant of monoamine oxidase
  source 1..1485: mol_type = other DNA
atgaccagccgcgacggctatcagtggaccccggaaacgggtctgacccagggcgtaccgtccctgggtgtcatttcgccgccgactaacatcgaagataccgataaggacgggccttgggatgtcattgtcattgggggcgggtattgtgggctgaccgcaacccgtgatttaaccgtcgcagggttcaagacgctgctgctggaggcccgtgatcgtattggtggccgctcctggagcagtaatattgacggttacccgtatgagatgggtggcacttgggttcattggcatcaaccgcacgtgtggcgtgaaatcacgcgttataaaatgcacaacgcgctgtctccatcatttaacttttcacgtggcgtgaatcacttccaactgcgtaccaatccgaccaccagtacgtacatgacgcacgaagcgtcggatgaactgatgcgtagcgcattgcataaattcaccaatgtcgacggcactaatggccgtacagtgttgccgttcccacatgatatgttttatgtgccggaatttcgcaagtatgacgaaatgtcatattccgaacgcattgaccagatccgcgacgatctgtctttgaacgaacgctctagtttagaggctttcattttattatgtagcggtggcaccctggaaaactccagctttggtgaatttctgcattggtgggcaatgtcgggttacacgtatcagggctgtattgattgtttaatttcctataaatttaaggatggccagagtgcgttcgcgcgtcgcttctgggaagaagccgctggcactggccgtctgggctatgtctttggtactccggtgcgttctgtggtgaacgaacgcgacgcagtacgtgttaccgcacgtgacggtcgcgaattcgcagcgaaacgtttggtttgcacgattccgctgaacgtattgagttctgttcattttagcccaccactgtccccgcaacgcatggccgctgcgaacattggccatgttaaccagtgcgtcaaagtgcatgcggaagtcagtaacaaggatatgcgttcatggtcgggtatctcctatccgttcaacaaattagcctacgctatcggcgatggcacgaccccagcgggtaatacgcatattgtgtgccttgggggggcccataatcatatccagccggaagaggacgtggaagcaacgaagatggccgttgaaaacatgtcgcctgggaatatggatatcaaacgtctggtcttccacaactggtgcaaggatgaatttgccaaaggcgcgtggttcttcgcccctccacagctgctgtcaaagagcctggatgaactgcgcgcacgtcacggtaatgtcctgtttgcaaactccgattgggccttaggttggcgtggttttatcgatggtgctatcgaggagggcacccgcgcagcggttactgtaattgaggaactgcgtcctgcgcctgcggtgcgttcccacctg

SEQ ID NO: 618 - protein, 495 aa, synthetic construct
  REGION 1..495: note = Variant of monoamine oxidase
MTSRDGYQWTPETGLTQGVPSLGVISPPTNIEDTDKDGPWDVIVIGGGYCGLTATRDLTVAGFKTLLLEARDRIGGRSWSSNIDGYPYEMGGTWVHWHQPHVWREITRYKMHNALSPSFNFSRGVNHFQLRTNPTTSTYMTHEASDELMRSALHKFTNVDGTNGRTVLPFPHDMFYVPEFRKYDEMSYSERIDQIRDDLSLNERSSLEAFILLCSGGTLENSSFGEFLHWWAMSGYTYQGCIDCLISYKFKDGQSAFARRFWEEAAGTGRLGYVFGTPVRSVVNERDAVRVTARDGREFAAKRLVCTIPLNVLSSVHFSPPLSPQRMAAANIGHVNQCVKVHAEVSNKDMRSWSGISYPFNKLAYAIGDGTTPAGNTHIVCLGGAHNHIQPEEDVEATKMAVENMSPGNMDIKRLVFHNWCKDEFAKGAWFFAPPQLLSKSLDELRARHGNVLFANSDWALGWRGFIDGAIEEGTRAAVTVIEELRPAPAVRSHL

SEQ ID NO: 619 - DNA, 1485 bp, synthetic construct
  misc_feature 1..1485: note = Variant of monoamine oxidase
  source 1..1485: mol_type = other DNA
atgaccagccgcgacggctatcagtggaccccggaaacgggtctgacccagggcgtaccgtccctgggtgtcatttcgccgccgactaacatcgaagataccgataaggacgggccttgggatgtcattgtcattgggggcgggtattgtgggctgaccgcaacccgtgatttaaccgtcgcagggttcaagacgctgctgctggaggcccgtgatcgtattggtggccgctcctggagcagtaatattgacggttacccgtatgagatgggtggcacttgggttcattggcatcaaccgcacgtgtggcgtgaaatcacgcgttataaaatgcacaacgcgctgtctccatcatttaacttttcacgtggcgtgaatcacttccaactgcgtaccaatccgaccaccagtacgtacatgacgcacgaagcggaggctgaactgctgcgtagcgcattgcataaattcaccaatgtcgacggcactaatggccgtacagtgttgccgttcccacatgatatgttttatgtgccggaatttcgcaagtatgacgaaatgtcatattccgaacgcattgaccagatccgcgacgatctgtctttgaacgaacgctctagtttagaggctttcattttattatgtagcggtggcaccctggaaaactccagctttggtgaatttctgcattggtgggcaatgtcgggttacacgtatcagggctgtatggattgtttaatttcctataaatttaaggatggccagagtgcgttcgcgcgtcgcttctgggaagaagccgctggcactggccgtctgggctatgtctttggttgtccggtgcgttctgtggtgaacgaacgcgacgcagtacgtgttaccgcacgtgacggtcgcgaattcgcagcgaaacgtttggtttgcacgattccgctgaacgtattgagttctgttcattttagcccaccactgtccccgcaacgcatggccgctgcgaacattggccatgttaaccagtgcgtcaaagtgcatgcggaagtcagtgacaaggatatgcgttcatggtcgggtatctcctatccgttcaacaaattagcctacgctatcggcgatggcacgaccccagcgggtaatacgcatattgtgtgccttgggggggcccataatcatatccagccggaagaggacgtggaagcaacgaagatggccgttgaaaacatgtcgcctgggaatatggatatcaaacgtctggtcttccacaactggtgcaaggatgaatttgccaaaggcgcgtggttcttcgcccctccacagctgctgtcaaagagcctggatgaactgcgcgcacgtcacggtaatgtcctgtttgcaaactccgattgggccttaggttggcgtggttttatcgatggtgctatcgaggagggcacccgcgcagcggttactgtaattgaggaactgcgtcctgcgcctgcggtgcgttcccacctg

SEQ ID NO: 620 - protein, 495 aa, synthetic construct
  REGION 1..495: note = Variant of monoamine oxidase
MTSRDGYQWTPETGLTQGVPSLGVISPPTNIEDTDKDGPWDVIVIGGGYCGLTATRDLTVAGFKTLLLEARDRIGGRSWSSNIDGYPYEMGGTWVHWHQPHVWREITRYKMHNALSPSFNFSRGVNHFQLRTNPTTSTYMTHEAEAELLRSALHKFTNVDGTNGRTVLPFPHDMFYVPEFRKYDEMSYSERIDQIRDDLSLNERSSLEAFILLCSGGTLENSSFGEFLHWWAMSGYTYQGCMDCLISYKFKDGQSAFARRFWEEAAGTGRLGYVFGCPVRSVVNERDAVRVTARDGREFAAKRLVCTIPLNVLSSVHFSPPLSPQRMAAANIGHVNQCVKVHAEVSDKDMRSWSGISYPFNKLAYAIGDGTTPAGNTHIVCLGGAHNHIQPEEDVEATKMAVENMSPGNMDIKRLVFHNWCKDEFAKGAWFFAPPQLLSKSLDELRARHGNVLFANSDWALGWRGFIDGAIEEGTRAAVTVIEELRPAPAVRSHL

SEQ ID NO: 621 - DNA, 1485 bp, synthetic construct
  misc_feature 1..1485: note = Variant of monoamine oxidase
  source 1..1485: mol_type = other DNA
atgaccagccgcgacggctatcagtggaccccggaaacgggtctgacccagggcgtaccgtccctgggtgtcatttcgccgccgactaacatcgaagataccgataaggacgggccttgggatgtcattgtcattgggggcgggtattgtgggctgaccgcaacccgtgatttaaccgtcgcagggttcaagacgctgctgctggaggcccgtgatcgtattggtggccgctcctggagcagtaatattgacggttacccgtatgagatgggtggcacttgggttcattggcatcaaccgcacgtgtggcgtgaaatcacgcgttataaaatgcacaacgcgctgtctccatcatttaacttttcacgtggcgtgaatcacttccaactgcgtaccaatccgaccaccagtacgtacatgacgcacgaagcgtcggctgaactgatgcgtagcgcattgcataaattcaccaatgtcgacggcactaatggccgtacagtgttgccgttcccacatgatatgttttatgtgccggaatttcgcaagtatgacgaaatgtcatattccgaacgcattgaccagatccgcgacgaactgtctttgaacgaacgcactagtttagaggctttcattttattatgtagcggtggcaccctggaaaactccagctttggtgaatttctgcattggtgggcaatgtcgggttacacgtatcagggctgtatggattgtttaatttcctataaatttaaggatggccagagtgcgttcgcgcgtcgcttctgggaagaagccgctggcactggccgtctgggctatgtctttggttgcccggtgcgttctgtggtgaacgaacgcgacgcagtacgtgttaccgcacgtgacggtcgcgaattcgcagcgaaacgtttggtttgcacgattccgctgaacgtattgagttctgttcattttagcccaccactgtccccgcaacgcatggccgctgcgaacattggccatgttaaccagtgcgtcaaagtgcatgcggaagtcagtgacccagatatgcgttcatggtcgggtatctcctatccgttcaacaaattagcctacgctatcggcgatggcacgaccccagcgggtaatacgcatattgtgtgccttgggggggcccataatcatatccagccggaagaggacgtggaagcaacgaagatggccgttgaaaacatgtcgcctgggaatatggatatcaaacgtctggtcttccacaactggtgcaaggatgaatttgccaaaggcgcgtggttcttcgcccctccacagctgctgtcaaagagcctggatgaacgtcgcgcacgtcacggtaatgtcctgtttgcaaactccgattgggccttaggttggcgtggttttatcgatggtgctatcgaggagggcacccgcgcagcggttactgtaattgaggaactgcgtcctgcgcctgcggtgcgttcccacctg

SEQ ID NO: 622 - protein, 495 aa, synthetic construct
  REGION 1..495: note = Variant of monoamine oxidase
MTSRDGYQWTPETGLTQGVPSLGVISPPTNIEDTDKDGPWDVIVIGGGYCGLTATRDLTVAGFKTLLLEARDRIGGRSWSSNIDGYPYEMGGTWVHWHQPHVWREITRYKMHNALSPSFNFSRGVNHFQLRTNPTTSTYMTHEASAELMRSALHKFTNVDGTNGRTVLPFPHDMFYVPEFRKYDEMSYSERIDQIRDELSLNERTSLEAFILLCSGGTLENSSFGEFLHWWAMSGYTYQGCMDCLISYKFKDGQSAFARRFWEEAAGTGRLGYVFGCPVRSVVNERDAVRVTARDGREFAAKRLVCTIPLNVLSSVHFSPPLSPQRMAAANIGHVNQCVKVHAEVSDPDMRSWSGISYPFNKLAYAIGDGTTPAGNTHIVCLGGAHNHIQPEEDVEATKMAVENMSPGNMDIKRLVFHNWCKDEFAKGAWFFAPPQLLSKSLDERRARHGNVLFANSDWALGWRGFIDGAIEEGTRAAVTVIEELRPAPAVRSHL

SEQ ID NO: 623 - DNA, 1485 bp, synthetic construct
  misc_feature 1..1485: note = Variant of monoamine oxidase
  source 1..1485: mol_type = other DNA
atgaccagccgcgacggctatcagtggaccccggaaacgggtctgacccagggcgtaccgtccctgggtgtcatttcgccgccgactaacatcgaagataccgataaggacgggccttgggatgtcattgtcattgggggcgggtattgtgggctgaccgcaacccgtgatttaaccgtcgcagggttcaagacgctgctgctggaggcccgtgatcgtattggtggccgctcctggagcagtaatattgacggttacccgtatgagatgggtggcacttgggttcattggcatcaaccgcacgtgtggcgtgaaatcacgcgttataaaatgcacaacgcgctgtctccatcatttaacttttcacgtggcgtgaatcacttccaactgcgtaccaatccgaccaccagtacgtacatgacgcacgaagcgtcggatgaactgatgcgtagcgcattgcataaattcaccaatgtcgacggcactaatggccgtacagtgttgccgttcccacatgatatgttttatgtgccggaatttcgcaagtatgacgaaatgtcatattccgaacgcattgaccagatccgcgacgaactgtctttgaacgaacgctctagtttagaggctttcattttattatgtagcggtggcaccctggaaaactccagctttggtgaatttctgcattggtgggcaatgtcgggttacacgtatcagggctgtatggattgtttaatgtcctataaatttaaggatggccagagtgcgttcgcgcgtcgcttctgggaagaagccgctggcactggccgtctgggctatgtctttggttgcccggtgcgttctgtggtgaacgaacgcgacgcagtacgtgttaccgcacgtgacggtcgcgaattcgcagcgaaacgtttggtttgcacgattccgctgaacgtattgagttctgttcattttagcccaccactgtccccgcaacgcatggccgctgcgaacattggccatgttaaccagtgcgtcaaagtgcatgcggaagtcagtaacccagatatgcgttcatggtcgggtatctcctatccgttcaacaaattagcctacgctatcggcgatggcacgaccccagcgggtaatacgcatattgtgtgccttgggggggcccataatcatatccagccggaagaggacgtggaagcaacgaagatggccgttgaaaacatgtcgcctgggaatatggatatcaaacgtctggtcttccacaactggtgcaaggatgaatttgccaaaggcgcgtggttcttcgcccctccacagctgctgtcaaagagcctggatgaacgtcgctgtcgtcacggtaatgtcctgtttgcaaactccgattgggccttaggttggcgtggttttatcgatggtgctatcgaggagggcacccgcgcagcggttactgtaattgaggaactgcgtcctgcgcctgcggtgcgttcccacctg

SEQ ID NO: 624 - protein, 495 aa, synthetic construct
  REGION 1..495: note = Variant of monoamine oxidase
MTSRDGYQWTPETGLTQGVPSLGVISPPTNIEDTDKDGPWDVIVIGGGYCGLTATRDLTVAGFKTLLLEARDRIGGRSWSSNIDGYPYEMGGTWVHWHQPHVWREITRYKMHNALSPSFNFSRGVNHFQLRTNPTTSTYMTHEASDELMRSALHKFTNVDGTNGRTVLPFPHDMFYVPEFRKYDEMSYSERIDQIRDELSLNERSSLEAFILLCSGGTLENSSFGEFLHWWAMSGYTYQGCMDCLMSYKFKDGQSAFARRFWEEAAGTGRLGYVFGCPVRSVVNERDAVRVTARDGREFAAKRLVCTIPLNVLSSVHFSPPLSPQRMAAANIGHVNQCVKVHAEVSNPDMRSWSGISYPFNKLAYAIGDGTTPAGNTHIVCLGGAHNHIQPEEDVEATKMAVENMSPGNMDIKRLVFHNWCKDEFAKGAWFFAPPQLLSKSLDERRCRHGNVLFANSDWALGWRGFIDGAIEEGTRAAVTVIEELRPAPAVRSHL

SEQ ID NO: 625 - DNA, 1485 bp, synthetic construct
  misc_feature 1..1485: note = Variant of monoamine oxidase
  source 1..1485: mol_type = other DNA
atgaccagccgcgacggctatcagtggaccccggaaacgggtctgacccagggcgtaccgtccctgggtgtcatttcgccgccgactaacatcgaagataccgataaggacgggccttgggatgtcattgtcattgggggcgggtattgtgggctgaccgcaacccgtgatttaaccgtcgcagggttcaagacgctgctgctggaggcccgtgatcgtattggtggccgctcctggagcagtaacattgacggttacccgtatgagatgggtggcacttgggttcattggcatcaatctcacgtgtggcgtgaaatcacgcgttataaaatgcacaacgcgctgtctccatcatttaacttttcacgtggcgtgaatcacttccaactgcgtaccaatccgaccaccagtacgtacatgacgcacgaagcggaggatgaactgctgcgtagcgcattgcataaattcaccaatgtcgacggcactaatggccgtacagtgttgccgttcccacatgatatgttttatgtgccggaatttcgcaagtatgacgaaatgtcatattccgaacgcattgaccagatccgcgacgaactgtctttgaacgaacgctctagtttagaggctttcattttattatgtagcggtggcaccctggaaaactccagctttggtgaatttctgcattggtgggcaatgtcgggttacacgtatcagggctgtatggattgtttaatctcctataaatttaaggatggccagagtgcgttcgcgcgtagcttctgggaagaagccgctggcactggccgtctgggctatgtctttggttgtccggtgcgttctgtggtgaacgaacgcgacgcagtacgtgttaccgcacgtgacggtcgcgaattcgcagcgaaacgtttggtttgcacgattccgctgaacgtattgagttctgttcattttagcccaccactgtccccgcaacgcatggccgctgcgaacattggccatgttaaccagggcgtcaaagtgcatgcggaagtcagttgtccggatatgcgttcatggtcgggtatctcctatccgttcaacaaattagcctacgctatcggcgatggcacgaccccagcgggtaatacgcatattgtgtgccttgggggggcccataatcatatccagccggaagaggacgtggaagcaacgaagatggccgttgaaaacatgtcgcctgggaatatggatatcaaacgtctggtcttcgggaactggagcaaggatgaatttgccaaaggcgcgtggttcttcgcccctccacagctgctgtcaaagagcctggatgaactgcgctgccgtcacggtaatgtcctgtttgcaaactccgattgggccttaggttggcgtggttttatcgatggtgctatcgaggagggcacccgcgcagcggttactgtaattgaggaactgcgtcctgcgcctgcggtgcgttcccacctg

SEQ ID NO: 626 - protein, 495 aa, synthetic construct
  REGION 1..495: note = Variant of monoamine oxidase
MTSRDGYQWTPETGLTQGVPSLGVISPPTNIEDTDKDGPWDVIVIGGGYCGLTATRDLTVAGFKTLLLEARDRIGGRSWSSNIDGYPYEMGGTWVHWHQSHVWREITRYKMHNALSPSFNFSRGVNHFQLRTNPTTSTYMTHEAEDELLRSALHKFTNVDGTNGRTVLPFPHDMFYVPEFRKYDEMSYSERIDQIRDELSLNERSSLEAFILLCSGGTLENSSFGEFLHWWAMSGYTYQGCMDCLISYKFKDGQSAFARSFWEEAAGTGRLGYVFGCPVRSVVNERDAVRVTARDGREFAAKRLVCTIPLNVLSSVHFSPPLSPQRMAAANIGHVNQGVKVHAEVSCPDMRSWSGISYPFNKLAYAIGDGTTPAGNTHIVCLGGAHNHIQPEEDVEATKMAVENMSPGNMDIKRLVFGNWSKDEFAKGAWFFAPPQLLSKSLDELRCRHGNVLFANSDWALGWRGFIDGAIEEGTRAAVTVIEELRPAPAVRSHL

SEQ ID NO: 627 - DNA, 1485 bp, synthetic construct
  misc_feature 1..1485: note = Variant of monoamine oxidase
  source 1..1485: mol_type = other DNA
atgaccagccgcgacggctatcagtggaccccggaaacgggtctgacccagggcgtaccgtccctgggtgtcatttcgccgccgactaacatcgaagataccgataaggacgggccttgggatgtcattgtcattgggggcgggtattgtgggctgaccgcaacccgtgatttaaccgtcgcagggttcaagacgctgctgctggaggcccgtgatcgtattggtggccgctcctggagcagtaatattgacggttacccgtatgagatgggtggcacttgggttcattggcatcaatcgcacgtgtggcgtgaaatcacgcgttataaaatgcacaacgcgctgtctccatcatttaacttttcacgtggcgtgaatcacttccaactgcgtaccaatccgaccaccagtacgtacatgacgcacgaagcgtcggatgaactgatgcgtagcgcattgcataaattcaccaatgtcgacggcactaatggccgtacagtgttgccgttcccacatgatatgttttatgtgccggaatttcgcaagtatgacgaaatgtcatattccgaacgcattgaccagatccgcgacgaactgtctttgaacgaacgctctagtttagaggctttcattttattatgtagcggtggcaccctggaaaactccagctttggtgaatttctgcattggtgggcaatgtcgggttacacgtatcagggctgtatggattgtttaatttcctataaatttaaggatggccagagtgcgttcgcgcgtcgcttctgggaagaagccgctggcactggccgtctgggctatgtctttggttgcccggtgcgttctgtggtgaacgaacgcgacgcagtacgtgttaccgcacgtgacggtcgcgaattcgcagcgaaacgtttggtttgcacgattccgctgaacgtattgagttctgttcattttagcccaccactgtccccgcaacgcatggccgctgcgaacattggccatgttaaccagtgcgtcaaagtgcatgcggaagtcagtaacaaggatatgcgttcatggtcgggtatctcctatccgttcaacaaattagcctacgctatcggcgatggcacgaccccagcgggtaatacgcatattgtgtgccttgggggggcccataatcatatccagccggaagaggacgtggaagcaacgaagatggccgttgaaaacatgtcgcctgggaatatggatatcaaacgtctggtcttccacaactggtgcaaggatgaatttgccaaaggcgcgtggttcttcgcccctccacagctgctgtcaaagagcctggatgaacgtcgctgtcgtcacggtaatgtcctgtttgcaaactccgattgggccttaggttggcgtggttttatcgatggtgctatcgaggagggcacccgcgcagcggttactgtaattgaggaactgcgtcctgcgcctgcggtgcgttcccacctg

SEQ ID NO: 628 - protein, 495 aa, synthetic construct
  REGION 1..495: note = Variant of monoamine oxidase
MTSRDGYQWTPETGLTQGVPSLGVISPPTNIEDTDKDGPWDVIVIGGGYCGLTATRDLTVAGFKTLLLEARDRIGGRSWSSNIDGYPYEMGGTWVHWHQSHVWREITRYKMHNALSPSFNFSRGVNHFQLRTNPTTSTYMTHEASDELMRSALHKFTNVDGTNGRTVLPFPHDMFYVPEFRKYDEMSYSERIDQIRDELSLNERSSLEAFILLCSGGTLENSSFGEFLHWWAMSGYTYQGCMDCLISYKFKDGQSAFARRFWEEAAGTGRLGYVFGCPVRSVVNERDAVRVTARDGREFAAKRLVCTIPLNVLSSVHFSPPLSPQRMAAANIGHVNQCVKVHAEVSNKDMRSWSGISYPFNKLAYAIGDGTTPAGNTHIVCLGGAHNHIQPEEDVEATKMAVENMSPGNMDIKRLVFHNWCKDEFAKGAWFFAPPQLLSKSLDERRCRHGNVLFANSDWALGWRGFIDGAIEEGTRAAVTVIEELRPAPAVRSHL

SEQ ID NO: 629 - DNA, 1485 bp, synthetic construct
  misc_feature 1..1485: note = Variant of monoamine oxidase
  source 1..1485: mol_type = other DNA
atgaccagccgcgacggctatcagtggaccccggaaacgggtctgacccagggcgtaccgtccctgggtgtcatttcgccgccgactaacatcgaagataccgataaggacgggccttgggatgtcattgtcattgggggcgggtattgtgggctgaccgcaacccgtgatttaaccgtcgcagggttcaagacgctgctgctggaggcccgtgatcgtattggtggccgctccgccagcagtaatattgacggttacccgtatgagatgggtggcggctgggttcattggcatcaatctcacgtgtggcgtgaaatcacgcgttataaaatgcacaacgcgctgtctccatcatttaacttttcacgtggcgtgaatcacttccaactgcgtaccaatccgaccaccagtacgtacatgacgcacgaagcggaggatgaactgctgcgtagcgcattgcataaattcaccaatgtcgacggcactaatggccgtacagtgttgccgttcccacatgatatgttttatgtgccggaatttcgcaagtatgatgaaatgtcatattccgaacgcattgaccagatccgcgacgaactgtctttgaacgaacgctctagtttagaggctttcattttattatgtagcggtggcaccctggaaaactccagctttggtgaatttctgcattggtgggcaatgtcgggttacacgtaccagggctgtatggattgtttaatctcctataaatttaaggatggccagagtgcgttcgcgcgtcgcttctgggaagaagccgctggcactggccgtctgggctatgtctttggttgtccggtgcgttctgtggtgaacgaacgcgacgcagtacgtgttaccgcacgtgacggtcgcgaattcgcagcgaaacgtttggtttgcacgattccgctgaacgtattgagttctgttcattttagcccaccactgtccccgcaacgcatggccgctgcgaacattggccatgttaaccagtgcgtcaaagtgcatgcggaagtcagttgtccggatatgcgttcatggtcgggtatctcctatccgttcaacaaattagcctacgctatcggcgatggcacgaccccagcgggtaatacgcatattgtgtgccttgggggggccgagaatcatatccagccggaagaggacgtggaagcaacgaagatggccgttgaaaacatgtcgcctgggaatatggatatcaaacgtctggtcttccacaactggtgcaaggatgaatttgccaaaggcgcgtggttcttcgcccctccacagctgctgtcaaagagcctggatgaactgcgctgccgtcacggtaatgtcctgtttgcaaactccgattgggccttaggttggcgtggttttatcgatggtgctatcgaggagggcacccgcgcagcggttactgtaattgaggaactgcgtcctgcgcctgcggtgcgttcccacctg

SEQ ID NO: 630 - protein, 495 aa, synthetic construct
  REGION 1..495: note = Variant of monoamine oxidase
MTSRDGYQWTPETGLTQGVPSLGVISPPTNIEDTDKDGPWDVIVIGGGYCGLTATRDLTVAGFKTLLLEARDRIGGRSASSNIDGYPYEMGGGWVHWHQSHVWREITRYKMHNALSPSFNFSRGVNHFQLRTNPTTSTYMTHEAEDELLRSALHKFTNVDGTNGRTVLPFPHDMFYVPEFRKYDEMSYSERIDQIRDELSLNERSSLEAFILLCSGGTLENSSFGEFLHWWAMSGYTYQGCMDCLISYKFKDGQSAFARRFWEEAAGTGRLGYVFGCPVRSVVNERDAVRVTARDGREFAAKRLVCTIPLNVLSSVHFSPPLSPQRMAAANIGHVNQCVKVHAEVSCPDMRSWSGISYPFNKLAYAIGDGTTPAGNTHIVCLGGAENHIQPEEDVEATKMAVENMSPGNMDIKRLVFHNWCKDEFAKGAWFFAPPQLLSKSLDELRCRHGNVLFANSDWALGWRGFIDGAIEEGTRAAVTVIEELRPAPAVRSHL

SEQ ID NO: 631 - DNA, 1485 bp, synthetic construct
  misc_feature 1..1485: note = Variant of monoamine oxidase
  source 1..1485: mol_type = other DNA
atgaccagccgcgacggctatcagtggaccccggaaacgggtctgacccagggcgtaccgtccctgggtgtcatttcgccgccgactaacatcgaagataccgataaggacgggccttgggatgtcattgtcattgggggcgggtattgtgggctgaccgcaacccgtgatttaaccgtcgcagggttcaagacgctgctgctggaggcccgtgatcgtattggtggccgctcctggagcagtaatattgacggttacccgtatgagatgggtggcacttgggttcattggcatcaatcgcacgtgtggcgtgaaatcacgcgttataaaatgcacaacgcgctgtctccatcatttaacttttcacgtggcgtgaatcacttccaactgcgtaccaatccgaccaccagtacgtacatgacgcacgaagcggaggctgaactgatgcgtagcgcattgcataaattcaccaatgtcgacggcactaatggccgtacagtgttgccgttcccacatgatatgttttatgtgccggaatttcgcaagtatgacgaaatgtcatattccgaacgcattgaccagatccgcgacgaactgtctttgaacgaacgctctagtttagaggctttcattttattatgtagcggtggcaccctggaaaactccagctttggtgaatttctgcattggtgggcaatgtcgggttacacgtatcagggctgtatggattgtttaatgtcctataaatttaagggtggccagagtgcgttcgcgcgtcgcttctgggaagaagccgctggcactggccgtctgggctatgtctttggttgcccggtgcgttctgtggtgaacgaacgcgacgcagtacgtgttaccgcacgtgacggtcgcgaattcgcagcgaaacgtttggtttgcacgattccgctgaacgtattgagttctgttcattttagcccaccactgtccccgcaacgcatggccgctgcgaacattggccatgttaaccagtgcgtcaaagtgcatgcggaagtcagttgtccggatatgcgttcatggtcgggtatctcctatccgttcaacaaattagcctacgctatcggcgatggcacgaccccagcgggtaatacgcatattgtgtgccttgggggggcccataatcatatccagccggaagaggacgtggaagcaacgaagatggccgttgaaaacatgtcgcctgggaatatggatatcaaacgtctggtcttccacaactggtgcaaggatgaatttgccaaaggcgcgtggttcttcgcccctccacagctgctgtcaaagagcctggatgaactgcgcgcacgtcacggtaatgtcctgtttgcaaactccgattgggccttaggttggcgtggttttatcgatggtgctatcgaggagggcacccgcgcagcggttactgtaattgaggaactgcgtcctgcgcctgcggtgcgttcccacctg

SEQ ID NO: 632 - protein, 495 aa, synthetic construct
  REGION 1..495: note = Variant of monoamine oxidase
MTSRDGYQWTPETGLTQGVPSLGVISPPTNIEDTDKDGPWDVIVIGGGYCGLTATRDLTVAGFKTLLLEARDRIGGRSWSSNIDGYPYEMGGTWVHWHQSHVWREITRYKMHNALSPSFNFSRGVNHFQLRTNPTTSTYMTHEAEAELMRSALHKFTNVDGTNGRTVLPFPHDMFYVPEFRKYDEMSYSERIDQIRDELSLNERSSLEAFILLCSGGTLENSSFGEFLHWWAMSGYTYQGCMDCLMSYKFKGGQSAFARRFWEEAAGTGRLGYVFGCPVRSVVNERDAVRVTARDGREFAAKRLVCTIPLNVLSSVHFSPPLSPQRMAAANIGHVNQCVKVHAEVSCPDMRSWSGISYPFNKLAYAIGDGTTPAGNTHIVCLGGAHNHIQPEEDVEATKMAVENMSPGNMDIKRLVFHNWCKDEFAKGAWFFAPPQLLSKSLDELRARHGNVLFANSDWALGWRGFIDGAIEEGTRAAVTVIEELRPAPAVRSHL

SEQ ID NO: 633 - DNA, 1485 bp, synthetic construct
  misc_feature 1..1485: note = Variant of monoamine oxidase
  source 1..1485: mol_type = other DNA
atgaccagccgcgacggctatcagtggaccccggaaacgggtctgacccagggcgtaccgtccctgggtgtcatttcgccgccgactaacatcgaagataccgataaggacgggccttgggatgtcattgtcattgggggcgggtattgtgggctgaccgcaacccgtgatttaaccgtcgcagggttcaagacgctgctgctggaggcccgtgatcgtattggtggccgctcctggagcagtaatattgacggttacccgtatgagatgggtggcacttgggttcattggcatcaaccgcacgtgtggcgtgaaatcacgcgttataaaatgcacaacgcgctgtctccatcatttaacttttcacgtggcgtgaatcacttccaactgcgtaccaatccgaccaccagtacgtacatgacgcacgaagcgtcggctgaactgatgcgtagcgcattgcataaattcaccaatgtcgacggcactaatggccgtacagtgttgccgttcccacatgatatgttttatgtgccggaatttcgcaagtatgacgaaatgtcatattccgaacgcattgaccagatccgcgacgatctgtctttgaacgaacgctctagtttagaggctttcattttattatgtagcggtggcaccctggaaaactccagctttggtgaatttctgcattggtgggcaatgtcgggttacacgtatcagggctgtatggattgtttaatctcctataaatttaaggatggccagagtgcgttcgcgcgtcgcttctgggaagaagccgctggcactggccgtctgggctatgtctttggttgcccggtgcgttctgtggtgaacgaacgcgacgcagtacgtgttaccgcacgtgacggtcgcgaattcgcagcgaaacgtttggtttgcacgattccgctgaacgtattgagttctgttcattttagcccaccactgtccccgcaacgcatggccgctgcgaacattggccatgttaaccagtgcgtcaaagtgcatgcggaagtcagttgtccggatatgcgttcatggtcgggtatctcctatccgttcaacaaattagcctacgctatcggcgatggcacgaccccagcgggtaatacgcatattgtgtgccttgggggggcccataatcatatccagccggaagaggacgtggaagcaacgaagatggccgttgaaaacatgtcgcctgggaatatggatatcaaacgtctggtcttccacaactggtgcaaggatgaatttgccaaaggcgcgtggttcttcgcccctccacagctgctgtcaaagagcctggatgaactgcgctgccgtcacggtaatgtcctgtttgcaaactccgattgggccttaggttggcgtggttttatcgatggtgctatcgaggagggcacccgcgcagcggttactgtaattgaggaactgcgtcctgcgcctgcggtgcgttcccacctg

SEQ ID NO: 634 - protein, 495 aa, synthetic construct
  REGION 1..495: note = Variant of monoamine oxidase
MTSRDGYQWTPETGLTQGVPSLGVISPPTNIEDTDKDGPWDVIVIGGGYCGLTATRDLTVAGFKTLLLEARDRIGGRSWSSNIDGYPYEMGGTWVHWHQPHVWREITRYKMHNALSPSFNFSRGVNHFQLRTNPTTSTYMTHEASAELMRSALHKFTNVDGTNGRTVLPFPHDMFYVPEFRKYDEMSYSERIDQIRDDLSLNERSSLEAFILLCSGGTLENSSFGEFLHWWAMSGYTYQGCMDCLISYKFKDGQSAFARRFWEEAAGTGRLGYVFGCPVRSVVNERDAVRVTARDGREFAAKRLVCTIPLNVLSSVHFSPPLSPQRMAAANIGHVNQCVKVHAEVSCPDMRSWSGISYPFNKLAYAIGDGTTPAGNTHIVCLGGAHNHIQPEEDVEATKMAVENMSPGNMDIKRLVFHNWCKDEFAKGAWFFAPPQLLSKSLDELRCRHGNVLFANSDWALGWRGFIDGAIEEGTRAAVTVIEELRPAPAVRSHL

SEQ ID NO: 635 - DNA, 1485 bp, synthetic construct
  misc_feature 1..1485: note = Variant of monoamine oxidase
  source 1..1485: mol_type = other DNA
atgaccagccgcgacggctatcagtggaccccggaaacgggtctgacccagggcgtaccgtccctgggtgtcatttcgccgccgactaacatcgaagataccgataaggacgggccttgggatgtcattgtcattgggggcgggtattgtgggctgaccgcaacccgtgatttaaccgtcgcagggttcaagacgctgctgctggaggcccgtgatcgtattggtggccgctcctggagcagtaatattgacggttacccgtatgagatgggtggcacttgggttcattggcatcaatcgcacgtgtggcgtgaaatcacgcgttataaaatgcacaacgcgctgtctccatcatttaacttttcacgtggcgtgaatcacttccaactgcgtaccaatccgaccaccagtacgtacatgacgcacgaagcgggggatgaactgatgcgtagcgcattgcataaattcaccaatgtcgacggcactaatggccgtacagtgttgccgttcccacatgatatgttttatgtgccggaatttcgcaagtatgacgaaatgtcatattccgaacgcattgaccagatccgcgacgaactgtctttgaacgaacgcactagtttagaggctttcattttattatgtagcggtggcaccctggaaaactccagctttggtgaatttctgcattggtgggcaatgtcgggttacacgtatcagggctgtattgattgtttaatttcctataaatttaaggatggccagagtgcgttcgcgcgtcgcttctgggaagaagccgctggcactggccgtctgggctatgtctttggttgcccggtgcgttctgtggtgaacgaacgcgacgcagtacgtgttaccgcacgtgacggtcgcgaattcgcagcgaaacgtttggtttgcacgattccgctgaacgtattgagttctgttcattttagcccaccactgtccccgcaacgcatggccgctgcgaacattggccatgttaaccagtgcgtcaaagtgcatgcggaagtcagtaacaaggatatgcgttcatggtcgggtatctcctatccgttcaacaaattagcctacgctatcggcgatggcacgaccccagcgggtaatacgcatattgtgtgccttgggggggcccataatcatatccagccggaagaggacgtggaagcaacgaagatggccgttgaaaacatgtcgcctgggaatatggatatcaaacgtctggtcttccacaactggtgcaaggatgaatttgccaaaggcgcgtggttcttcgcccctccacagctgctgtcaaagagcctggatgaacgtcgctgtcgtcacggtaatgtcctgtttgcaaactccgattgggccttaggttggcgtggttttatcgatggtgctatcgaggagggcacccgcgcagcggttactgtaattgaggaactgcgtcctgcgcctgcggtgcgttcccacctg

SEQ ID NO: 636 - protein, 495 aa, synthetic construct
  REGION 1..495: note = Variant of monoamine oxidase
MTSRDGYQWTPETGLTQGVPSLGVISPPTNIEDTDKDGPWDVIVIGGGYCGLTATRDLTVAGFKTLLLEARDRIGGRSWSSNIDGYPYEMGGTWVHWHQSHVWREITRYKMHNALSPSFNFSRGVNHFQLRTNPTTSTYMTHEAGDELMRSALHKFTNVDGTNGRTVLPFPHDMFYVPEFRKYDEMSYSERIDQIRDELSLNERTSLEAFILLCSGGTLENSSFGEFLHWWAMSGYTYQGCIDCLISYKFKDGQSAFARRFWEEAAGTGRLGYVFGCPVRSVVNERDAVRVTARDGREFAAKRLVCTIPLNVLSSVHFSPPLSPQRMAAANIGHVNQCVKVHAEVSNKDMRSWSGISYPFNKLAYAIGDGTTPAGNTHIVCLGGAHNHIQPEEDVEATKMAVENMSPGNMDIKRLVFHNWCKDEFAKGAWFFAPPQLLSKSLDERRCRHGNVLFANSDWALGWRGFIDGAIEEGTRAAVTVIEELRPAPAVRSHL

SEQ ID NO: 637 - DNA, 1485 bp, synthetic construct
  misc_feature 1..1485: note = Variant of monoamine oxidase
  source 1..1485: mol_type = other DNA
atgaccagccgcgacggctatcagtggaccccggaaacgggtctgacccagggcgtaccgtccctgggtgtcatttcgccgccgactaacatcgaagataccgataaggacgggccttgggatgtcattgtcattgggggcgggtattgtgggctgaccgcaacccgtgatttaaccgtcgcagggttcaagacgctgctgctggaggcccgtgatcgtattggtggccgctcctggagcagtaacattgacggttacctgtatgagatgggtggcacttgggttcattggcatcaatctcacgtgtggcgtgaaatcacgcgttataaaatgcacggcgcgctgtctaaatcatttaacttttcacgtggcgtgaatcacttccaactgcgtaccaatccgaccaccagtacgtacatgacgcacgaagcggaggatgaactgctgcgtagcgcattgcataaattcaccaatgtcgacggcactaatggccgtacagtgttgccgttcccacatgatatgttttatgtgccggaatttcgcaagtatgacgaaatgtcatattccgaacgcattgaccagatccgcgacgaactgtctttgaacgaacgctctagtttagaggctttcattttattatgtagcggtggcacctcggaaaactccagctttggtgaatttctgcattggtgggcaatgtcgggttacacgtatcagggctgtatggattgtttaatctcctataaatttaaggatggccagagtgcgttcgcgcgtcgcttctgggaagaagccgctggcactggccgtctgggctatgtctttggttgtccggtgcgttctgtggtgaacgaacgcgacgcagtacgtgttaccgcacgtgacggtcgcgaattcgcagcgaaacgtttggtttgcacgattccgctgaacgtattgagttctgttcattttagcccaccactgtccccgcaacgcatggccgctgcgaacattggccatgttaaccagggcgtcaaagtgcatgcggaagtcagttgtccggatatgcgttcatggtcgggtatctcctatccgttcaacaaattagcctacgctatcggcgatggcacgaccccagcgggtaatacgcatattgtgtgccttgggggggcccataatcatatccagccggaagaggacgtggaagcaacgaagatggccgttgaaaacatgtcgcctgggaatatggatatcaaacgtctggtcttcgggaactggagcaaggatgaatttgccaaaggcgcgtggttcttcgcccctccacagctgctgtcaaagagcctggatgaactgcgctgccgtcacggtaatgtcctgtttgcaaactccgattgggccttaggttggcgtggttttatcgatggtgctatcgaggagggcacccgcgcagcggttactgtaattgaggaactgcgtcctgcgcctgcggtgcgttcccacctg

SEQ ID NO: 638 - protein, 495 aa, synthetic construct
  REGION 1..495: note = Variant of monoamine oxidase
MTSRDGYQWTPETGLTQGVPSLGVISPPTNIEDTDKDGPWDVIVIGGGYCGLTATRDLTVAGFKTLLLEARDRIGGRSWSSNIDGYLYEMGGTWVHWHQSHVWREITRYKMHGALSKSFNFSRGVNHFQLRTNPTTSTYMTHEAEDELLRSALHKFTNVDGTNGRTVLPFPHDMFYVPEFRKYDEMSYSERIDQIRDELSLNERSSLEAFILLCSGGTSENSSFGEFLHWWAMSGYTYQGCMDCLISYKFKDGQSAFARRFWEEAAGTGRLGYVFGCPVRSVVNERDAVRVTARDGREFAAKRLVCTIPLNVLSSVHFSPPLSPQRMAAANIGHVNQGVKVHAEVSCPDMRSWSGISYPFNKLAYAIGDGTTPAGNTHIVCLGGAHNHIQPEEDVEATKMAVENMSPGNMDIKRLVFGNWSKDEFAKGAWFFAPPQLLSKSLDELRCRHGNVLFANSDWALGWRGFIDGAIEEGTRAAVTVIEELRPAPAVRSHL

SEQ ID NO: 639 - DNA, 1485 bp, synthetic construct
  misc_feature 1..1485: note = Variant of monoamine oxidase
  source 1..1485: mol_type = other DNA
atgaccagccgcgacggctatcagtggaccccggaaacgggtctgacccagggcgtaccgtccctgggtgtcatttcgccgccgactaacatcgaagataccgataaggacgggccttgggatgtcattgtcattgggggcgggtattgtgggctgaccgcaacccgtgatttaaccgtcgcagggttcaagacgctgctgctggaggcccgtgatcgtattggtggccgctcctggagcagtaatattgacggttacccgtatgagatgggtggcacttgggttcattggcatcaatcgcacgtgtggcgtgaaatcacgcgttataaaatgcacaacgcgctgtctccatcatttaacttttcacgtggcgtgaatcacttccaactgcgtaccaatccgaccaccagtacgtacatgacgcacgaagcggaggctgaactgctgcgtagcgcattgcataaattcaccaatgtcgacggcactaatggccgtacagtgttgccgttcccacatgatatgttttatgtgccggaatttcgcaagtatgacgaaatgtcatattccgaacgcattgaccagatccgcgacgaactgtctttgaacgaacgctctagtttagaggctttcattttattatgtagcggtggcaccctggaaaactccagctttggtgaatttctgcattggtgggcaatgtcgggttacacgtatcagggctgtatggattgtttaatctcctataaatttaaggatggccagagtgcgttcgcgcgtcgcttctgggaagaagccgctggcactggccgtctgggctatgtctttggtactccggtgcgttctgtggtgaacgaacgcgacgcagtacgtgttaccgcacgtgacggtcgcgaattcgcagcgaaacgtttggtttgcacgattccgctgaacgtattgagttctgttcattttagcccaccactgtccccgcaacgcatggccgctgcgaacattggccatgttaaccagtgcgtcaaagtgcatgcggaagtcagtaacaaggatatgcgttcatggtcgggtatctcctatccgttcaacaaattagcctacgctatcggcgatggcacgaccccagcgggtaatacgcatattgtgtgccttgggggggcccataatcatatccagccggaagaggacgtggaagcaacgaagatggccgttgaaaacatgtcgcctgggaatatggatatcaaacgtctggtcttccacaactggtgcaaggatgaatttgccaaaggcgcgtggttcttcgcccctccacagctgctgtcaaagagcctggatgaactgcgctgccgtcacggtaatgtcctgtttgcaaactccgattgggccttaggttggcgtggttttatcgatggtgctatcgaggagggcacccgcgcagcggttactgtaattgaggaactgcgtcctgcgcctgcggtgcgttcccacctg

SEQ ID NO: 640 - protein, 495 aa, synthetic construct
  REGION 1..495: note = Variant of monoamine oxidase
MTSRDGYQWTPETGLTQGVPSLGVISPPTNIEDTDKDGPWDVIVIGGGYCGLTATRDLTVAGFKTLLLEARDRIGGRSWSSNIDGYPYEMGGTWVHWHQSHVWREITRYKMHNALSPSFNFSRGVNHFQLRTNPTTSTYMTHEAEAELLRSALHKFTNVDGTNGRTVLPFPHDMFYVPEFRKYDEMSYSERIDQIRDELSLNERSSLEAFILLCSGGTLENSSFGEFLHWWAMSGYTYQGCMDCLISYKFKDGQSAFARRFWEEAAGTGRLGYVFGTPVRSVVNERDAVRVTARDGREFAAKRLVCTIPLNVLSSVHFSPPLSPQRMAAANIGHVNQCVKVHAEVSNKDMRSWSGISYPFNKLAYAIGDGTTPAGNTHIVCLGGAHNHIQPEEDVEATKMAVENMSPGNMDIKRLVFHNWCKDEFAKGAWFFAPPQLLSKSLDELRCRHGNVLFANSDWALGWRGFIDGAIEEGTRAAVTVIEELRPAPAVRSHL

SEQ ID NO: 641 - DNA, 1485 bp, synthetic construct
  misc_feature 1..1485: note = Variant of monoamine oxidase
  source 1..1485: mol_type = other DNA
atgaccagccgcgacggctatcagtggaccccggaaacgggtctgacccagggcgtaccgtccctgggtgtcatttcgccgccgactaacatcgaagataccgataaggacgggccttgggatgtcattgtcattgggggcgggtattgtgggctgaccgcaacccgtgatttaaccgtcgcagggttcaagacgctgctgctggaggcccgtgatcgtattggtggccgctccgacgtgagtaatattgacggttacccgtatgagatgggtggcacttgggttcattggcatcaatctcacgtgtggcgtgaaatcacgcgttataaaatgcacaacgcgctgtctccatcatttaacttttcacgtggcgtgaatcacttccaactgcgtaccaatccgaccaccagtacgtacatgacgcacgaagcggaggatgaactgctgcgtagcgcattgcataaattcaccaatgtcgacggcactaatggccgtacagtgttgccgttcccacatgatatgttttatgtgccggaatttcgcaagtatgacgaaatgtcatattccgaacgcattgaccagatccgcgacgaactgtctttgaacgaacgctctagtttagaggctttcattttattatgtagcggtggcaccctggaaaactccagctttggtgaatttctgcattggtgggcaatgtcgggttacacgtatcagggctgtatggattgtttaatctcctataaatttaaggatggccagagtgcgttcgcgcgtcgcttctgggaagaagccgctggcactggccgtctgggctatgtctttggttgtccggtgcgttctgtggtgaacgaacgcgacgcagtacgtgttaccgcacgtgacggtcgcgaattcgcagcgaaacgtttggtttgcacgattccgctgaacgtattgagttctgttcattttagcccaccactgtccccgcaacgcatggccgctgcgaacattggccatgttaaccagtgcgtcaaagtgcatgcggaagtcagttgtccggatatgcgttcatggtcgggtatctcctatccgttcaacaaattagcctacgctatcggcgatggcacgaccccagcgggtaatacgcatattgtgtgccttgggggggcccataatcatatccagccggaagaggacgtggaagcaacgaagatggccgttgaaaacatgtcgcctgggaatatggatatcaaacgtctggtcttccacaactggtgcaaggatgaatttgccaaaggcgcgtggttcttcgcccctccacagctgctgtcaaagagcctggatgaactgcgctgccgtcacggtaatgtcctgtttgcaaactccgattgggccttaggttggcgtggttttatcgatggtgctatcgaggagggcacccgcgcagcggttactgtaattgaggaactgcgtcctgcgcctgcggtgcgttcccacctg

SEQ ID NO: 642 - protein, 495 aa, synthetic construct
  REGION 1..495: note = Variant of monoamine oxidase
MTSRDGYQWTPETGLTQGVPSLGVISPPTNIEDTDKDGPWDVIVIGGGYCGLTATRDLTVAGFKTLLLEARDRIGGRSDVSNIDGYPYEMGGTWVHWHQSHVWREITRYKMHNALSPSFNFSRGVNHFQLRTNPTTSTYMTHEAEDELLRSALHKFTNVDGTNGRTVLPFPHDMFYVPEFRKYDEMSYSERIDQIRDELSLNERSSLEAFILLCSGGTLENSSFGEFLHWWAMSGYTYQGCMDCLISYKFKDGQSAFARRFWEEAAGTGRLGYVFGCPVRSVVNERDAVRVTARDGREFAAKRLVCTIPLNVLSSVHFSPPLSPQRMAAANIGHVNQCVKVHAEVSCPDMRSWSGISYPFNKLAYAIGDGTTPAGNTHIVCLGGAHNHIQPEEDVEATKMAVENMSPGNMDIKRLVFHNWCKDEFAKGAWFFAPPQLLSKSLDELRCRHGNVLFANSDWALGWRGFIDGAIEEGTRAAVTVIEELRPAPAVRSHL

SEQ ID NO: 643 - DNA, 1485 bp, synthetic construct
  misc_feature 1..1485: note = Variant of monoamine oxidase
  source 1..1485: mol_type = other DNA
atgaccagccgcgacggctatcagtggaccccggaaacgggtctgacccagggcgtaccgtccctgggtgtcatttcgccgccgactaacatcgaagataccgataaggacgggccttgggatgtcattgtcattgggggcgggtattgtgggctgaccgcaacccgtgatttaaccgtcgcagggttcaagacgctgctgctggaggcccgtgatcgtattggtggccgctcctggagcagtaatattgacggttacccgtatgagatgggtggcacttgggttcattggcatcaatcgcacgtgtggcgtgaaatcacgcgttataaaatgcacaacgcgctgtctccatcatttaacttttcacgtggcgtgaatcacttccaactgcgtaccaatccgaccaccagtacgtacatgacgcacgaagcgtcggatgaactgctgcgtagcgcattgcataaattcaccaatgtcgacggcactaatggccgtacagtgttgccgttcccacatgatatgttttatgtgccggaatttcgcaagtatgacgaaatgtcatattccgaacgcattgaccagatccgcgacgaactgtctttgaacgaacgctctagtttagaggctttcattttattatgtagcggtggcaccctggaaaactccagctttggtgaatttctgcattggtgggcaatgtcgggttacacgtatcagggctgtatggattgtttaatctcctataaatttaaggatggccagagtgcgttcgcgcgtcgcttctgggaagaagccgctggcactggccgtctgggctatgtctttggttgcccggtgcgttctgtggtgaacgaacgcgacgcagtacgtgttaccgcacgtgacggtcgcgaattcgcagcgaaacgtttggtttgcacgattccgctgaacgtattgagttctgttcattttagcccaccactgtccccgcaacgcatggccgctgcgaacattggccatgttaaccagtgcgtcaaagtgcatgcggaagtcagtgacaaggatatgcgttcatggtcgggtatctcctatccgttcaacaaattagcctacgctatcggcgatggcacgaccccagcgggtaatacgcatattgtgtgccttgggggggcccataatcatatccagccggaagaggacgtggaagcaacgaagatggccgttgaaaacatgtcgcctgggaatatggatatcaaacgtctggtcttccacaactggtgcaaggatgaatttgccaaaggcgcgtggttcttcgcccctccacagctgctgtcaaagagcctggatgaacgtcgcgcacgtcacggtaatgtcctgtttgcaaactccgattgggccttaggttggcgtggttttatcgatggtgctatcgaggagggcacccgcgcagcggttactgtaattgaggaactgcgtcctgcgcctgcggcgcgttcccacctg

SEQ ID NO: 644 - protein, 495 aa, synthetic construct
  REGION 1..495: note = Variant of monoamine oxidase
MTSRDGYQWTPETGLTQGVPSLGVISPPTNIEDTDKDGPWDVIVIGGGYCGLTATRDLTVAGFKTLLLEARDRIGGRSWSSNIDGYPYEMGGTWVHWHQSHVWREITRYKMHNALSPSFNFSRGVNHFQLRTNPTTSTYMTHEASDELLRSALHKFTNVDGTNGRTVLPFPHDMFYVPEFRKYDEMSYSERIDQIRDELSLNERSSLEAFILLCSGGTLENSSFGEFLHWWAMSGYTYQGCMDCLISYKFKDGQSAFARRFWEEAAGTGRLGYVFGCPVRSVVNERDAVRVTARDGREFAAKRLVCTIPLNVLSSVHFSPPLSPQRMAAANIGHVNQCVKVHAEVSDKDMRSWSGISYPFNKLAYAIGDGTTPAGNTHIVCLGGAHNHIQPEEDVEATKMAVENMSPGNMDIKRLVFHNWCKDEFAKGAWFFAPPQLLSKSLDERRARHGNVLFANSDWALGWRGFIDGAIEEGTRAAVTVIEELRPAPAARSHL

SEQ ID NO: 645 - DNA, 1485 bp, synthetic construct
  misc_feature 1..1485: note = Variant of monoamine oxidase
  source 1..1485: mol_type = other DNA
atgaccagccgcgacggctatcagtggaccccggaaacgggtctgacccagggcgtaccgtccctgggtgtcatttcgccgccgactaacatcgaagataccgataaggacgggccttgggatgtcattgtcattgggggcgggtattgtgggctgaccgcaacccgtgatttaaccgtcgcagggttcaagacgctgctgctggaggcccgtgatcgtattggtggccgctcctggagcagtaatattgacggttacccgtatgagatgggtggcacttgggttcattggcatcaaccgcacgtgtggcgtgaaatcacgcgttataaaatgcacaacgcgctgtctccatcatttaacttttcacgtggcgtgaatcacttccaactgcgtaccaatccgaccaccagtacgtacatgacgcacgaagcggaggatgaactgctgcgtagcgcattgcataaattcaccaatgtcgacggcactaatggccgtacagtgttgccgttcccacatgatatgttttatgtgccggaatttcgcaagtatgacgaaatgtcatattccgaacgcattgaccagatccgcgacgaactgtctttgaacgaacgctctagtttagaggctttcattttattatgtagcggtggcaccctggaaaactccagctttggtgaatttctgcattggtgggcaatgtcgggttacacgtatcagggctgtatggattgtttaatctcctataaatttaaggatggccagagtgcgttcgcgcgtcgcttctgggaagaagccgctggcactggccgtctgggctatgtctttggttgcccggtgcgttctgtggtgaacgaacgcgacgcagtacgtgttaccgcacgtgacggtcgcgaattcgcagcgaaacgtttggtttgcacgattccgctgaacgtattgagttctgttcattttagcccaccactgtccccgcaacgcatggccgctgcgaacattggccatgttaaccagtgcgtcaaagtgcatgcggaagtcagtaacaaggatatgcgttcatggtcgggtatctcctatccgttcaacaaattagcctacgctatcggcgatggcacgaccccagcgggtaatacgcatattgtgtgccttgggggggcccataatcatatccagccggaagaggacgtggaagcaacgaagatggccgttgaaaacatgtcgcctgggaatatggatatcaaacgtctggtcttccacaactggtgcaaggatgaatttgccaaaggcgcgtggttcttcgcccctccacagctgctgtcaaagagcctggatgaacgtcgctgtcgtcacggtaatgtcctgtttgcaaactccgattgggccttaggttggcgtggttttatcgatggtgctatcgaggagggcacccgcgcagcggttactgtaattgaggaactgcgtcctgcgcctgcggtgcgttcccacctg

SEQ ID NO: 646 - protein, 495 aa, synthetic construct
  REGION 1..495: note = Variant of monoamine oxidase
MTSRDGYQWTPETGLTQGVPSLGVISPPTNIEDTDKDGPWDVIVIGGGYCGLTATRDLTVAGFKTLLLEARDRIGGRSWSSNIDGYPYEMGGTWVHWHQPHVWREITRYKMHNALSPSFNFSRGVNHFQLRTNPTTSTYMTHEAEDELLRSALHKFTNVDGTNGRTVLPFPHDMFYVPEFRKYDEMSYSERIDQIRDELSLNERSSLEAFILLCSGGTLENSSFGEFLHWWAMSGYTYQGCMDCLISYKFKDGQSAFARRFWEEAAGTGRLGYVFGCPVRSVVNERDAVRVTARDGREFAAKRLVCTIPLNVLSSVHFSPPLSPQRMAAANIGHVNQCVKVHAEVSNKDMRSWSGISYPFNKLAYAIGDGTTPAGNTHIVCLGGAHNHIQPEEDVEATKMAVENMSPGNMDIKRLVFHNWCKDEFAKGAWFFAPPQLLSKSLDERRCRHGNVLFANSDWALGWRGFIDGAIEEGTRAAVTVIEELRPAPAVRSHL

SEQ ID NO: 647 - DNA, 1485 bp, synthetic construct
  misc_feature 1..1485: note = Variant of monoamine oxidase
  source 1..1485: mol_type = other DNA
atgaccagccgcgacggctatcagtggaccccggaaacgggtctgacccagggcgtaccgtccctgggtgtcatttcgccgccgactaacatcgaagataccgataaggacgggccttgggatgtcattgtcattgggggcgggtattgtgggctgaccgcaacccgtgatttaaccgtcgcagggttcaagacgctgctgctggaggcccgtgatcgtattggtggccgctcctggagcagtaacattgacggttacggttatgagatgggtggcacttgggttcattggcatcaatctcacgtgtggcgtgaaatcacgcgttataaaatgcacaacgcgctgtctccatcatttaacttttcacgtggcgtgaatcacttccaactgcgtaccaatccgaccaccagtacgtacatgacgcacgaagcggaggatgaactgctgcgtagcgcattgcataaattcaccaatgtcgacggcactaatggccgtacagtgttgccgttcccacatgatatgttttatgtgccggaatttcgcaagtatgacgaaatgtcatattccgaacgcattgaccagatccgcgacgaactgtctttgaacgaacgctctagtttagaggctttcattttattatgtagcggtggcaccctggaaaactccagctttggtgaatttctgcattggtgggcaatgtcgggttacacgtatcagggctgtatggattgtttaatctcctataaatttaaggatggccagagtgcgttcgcgcgtcgcttctgggaagaagccgctggcactggccgtctgggctatgtctttggttgtccggtgcgttctgtggtgaacgaacgcgacgcagtacgtgttaccgcacgtgacggtcgcgaattcgcagcgaaacgtttggtttgcacgattccgctgaacgtattgagttctgttcattttagcccaccactgtccccgcaacgcatggccgctgcgaacattggccatgttaaccagtgcgtcaaagtgcatgcggaagtcagttgtccggatatgcgttcatggtcgggtatctcctatccgttcaacaaattagcctacgctatcggcgatggcacgaccccagcgggtaatacgcatattgtgtgccttgggggggcccataatcatatccagccggaagaggacgtggaagcaacgaagatggccgttgaaaacatgtcgcctgggaatatggatatcaaacgtctggtcttccacaactggtgcaaggatgaatttgccaaaggcgcgtggttcttcgcccctccacagctgctgtcaaagagcctggatgaactgcgctgccgtcacggtaatgtcctgtttgcaaactccgattgggccttaggttggcgtggttttatcgatggtgctatcgaggagggcacccgcgcagcggttactgtaattgaggaactgcgtcctgcgcctgcggtgcgttcccacctg

SEQ ID NO: 648 - protein, 495 aa, synthetic construct; identical to SEQ ID NO: 12
  REGION 1..495: note = Variant of monoamine oxidase

SEQ ID NO: 649 - DNA, 1485 bp, synthetic construct
  misc_feature 1..1485: note = Variant of monoamine oxidase
  source 1..1485: mol_type = other DNA
atgaccagccgcgacggctatcagtggaccccggaaacgggtctgacccagggcgtaccgtccctgggtgtcatttcgccgccgactaacatcgaagataccgataaggacgggccttgggatgtcattgtcattgggggcgggtattgtgggctgaccgcaacccgtgatttaaccgtcgcagggttcaagacgctgctgctggaggcccgtgatcgtattggtggccgctcctggcacagtaatattgacggttacccgtatgagatgggtggcacttgggttcattggcatcaatctcacgtgtggcgtgaaatcacgcgttataaaatgcacaacgcgctgtctccatcatttaacttttcacgtggcgtgaatcacttccaactgcgtaccaatccgaccaccagtacgtacatgacgcacgaagcggaggatgaactgctgcgtagcgcattgcataaattcaccaatgtcgacggcactaatggccgtacagtgttgccgttcccacatgatatgttttatgtgccggaatttcgcaagtatgatgaaatgtcatattccgaacgcattgaccagatccgcgacgaactgtctttgaacgaacgctctagtttagaggctttcattttattatgtagcggtggcaccctggaaaactccagctttggtgaatttctgcattggtgggcaatgtcgggttacacgtaccagggctgtatggattgtttaatctcctataaatttaaggatggccagagtgcgttcgcgcgtcgcttctgggaagaagccgctggcactggccgtctgggctatgtctttggttgtccggtgcgttctgtggtgaacgaacgcgacgcagtacgtgttaccgcacgtgacggtcgcgaattcgcagcgaaacgtttggtttgcacgattccgctgaacgtattgagttctgttcattttagcccaccactgtccccgcaacgcatggccgctgcgaacatcggccatgttaaccagtgcgtcaaagtgcatgcggaagtcagttgtccggatatgcgttcatggtcgggtatctcctatccgttcaacaaattagcctacgctatcggcgatggcacgaccccagcgggtaatacgcatattgtgtgccttgggggggccgagaatcatatccagccggaagaggacgtggaagcaacgaagatggccgttgaaaacatgtcgcctgggaatatggatatcaaacgtctggtcttccacaactggtgcaaggatgaatttgccaaaggcgcgtggttcttcgcccctccacagctgctgtcaaagagcctggatgaactgcgctgccgtcacggtaatgtcctgtttgcaaactccgattgggccttaggttggcgtggttttatcgatggtgctatcgaggagggcacccgcgcagcggttactgtaattgaggaactgcgtcctgcgcctgcggtgcgttcccacctg

SEQ ID NO: 650 - protein, 495 aa, synthetic construct
  REGION 1..495: note = Variant of monoamine oxidase
MTSRDGYQWTPETGLTQGVPSLGVISPPTNIEDTDKDGPWDVIVIGGGYCGLTATRDLTVAGFKTLLLEARDRIGGRSWHSNIDGYPYEMGGTWVHWHQSHVWREITRYKMHNALSPSFNFSRGVNHFQLRTNPTTSTYMTHEAEDELLRSALHKFTNVDGTNGRTVLPFPHDMFYVPEFRKYDEMSYSERIDQIRDELSLNERSSLEAFILLCSGGTLENSSFGEFLHWWAMSGYTYQGCMDCLISYKFKDGQSAFARRFWEEAAGTGRLGYVFGCPVRSVVNERDAVRVTARDGREFAAKRLVCTIPLNVLSSVHFSPPLSPQRMAAANIGHVNQCVKVHAEVSCPDMRSWSGISYPFNKLAYAIGDGTTPAGNTHIVCLGGAENHIQPEEDVEATKMAVENMSPGNMDIKRLVFHNWCKDEFAKGAWFFAPPQLLSKSLDELRCRHGNVLFANSDWALGWRGFIDGAIEEGTRAAVTVIEELRPAPAVRSHL

SEQ ID NO: 651 - DNA, 1485 bp, synthetic construct
  misc_feature 1..1485: note = Variant of monoamine oxidase
  source 1..1485: mol_type = other DNA
atgaccagccgcgacggctatcagtggaccccggaaacgggtctgacccagggcgtaccgtccctgggtgtcatttcgccgccgactaacatcgaagataccgataaggacgggccttgggatgtcattgtcattgggggcgggtattgtgggctgaccgcaacccgtgatttaaccgtcgcagggttcaagacgctgctgctggaggcccgtgatcgtattggtggccgctcctggagcagtaatattgacggttacccgtatgagatgggtggcacttgggttcattggcatcaaccgcacgtgtggcgtgaaatcacgcgttataaaatgcacaacgcgctgtctccatcatttaacttttcacgtggcgtgaatcacttccaactgcgtaccaatccgaccaccagtacgtacatgacgcacgaagcgggggatgaactgctgcgtagcgcattgcataaattcaccaatgtcgacggcactaatggccgtacagtgttgccgttcccacatgatatgttttatgtgccggaatttcgcaagtatgacgaaatgtcatattccgaacgcattgaccagatccgcgacgatctgtctttgaacgaacgctctagtttagaggctttcattttattatgtagcggtggcaccctggaaaactccagctttggtgaatttctgcattggtgggcaatgtcgggttacacgtatcagggctgtatggattgtttaatttcctataaatttaaggatggccagagtgcgttcgcgcgtcgcttctgggaagaagccgctggcactggccgtctgggctatgtctttggttgtccggtgcgttctgtggtgaacgaacgcgacgcagtacgtgttaccgcacgtgacggtcgcgaattcgtagcgaaacgtttggtttgcacgattccgctgaacgtattgagttctgttcattttagcccaccactgtccccgcaacgcatggccgctgcgaacattggccatgttaaccagtgcgtcaaagtgcatgcggaagtcagttgcccagatatgcgttcatggtcgggtatctcctatccgttcaacaaattagcctacgctatcggcgatggcacgaccccagcgggtaatacgcatattgtgtgccttgggggggcccataatcatatccagccggaagaggacgtggaagcaacgaagatggccgttgaaaacatgtcgcctgggaatatggatatcaaacgtctggtcttccacaactggtgcaaggatgaatttgccaaaggcgcgtggttcttcgcccctccacagctgctgtcaaagagcctggatgaactgcgctgtcgtcacggtaatgtcctgtttgcaaactccgattgggccttaggttggcgtggttttatcgatggtgctatcgaggagggcacccgcgcagcggttactgtaattgaggaactgcgtcctgcgcctgcggtgcgttcccacctg

SEQ ID NO: 652 - protein, 495 aa, synthetic construct
  REGION 1..495: note = Variant of monoamine oxidase
MTSRDGYQWTPETGLTQGVPSLGVISPPTNIEDTDKDGPWDVIVIGGGYCGLTATRDLTVAGFKTLLLEARDRIGGRSWSSNIDGYPYEMGGTWVHWHQPHVWREITRYKMHNALSPSFNFSRGVNHFQLRTNPTTSTYMTHEAGDELLRSALHKFTNVDGTNGRTVLPFPHDMFYVPEFRKYDEMSYSERIDQIRDDLSLNERSSLEAFILLCSGGTLENSSFGEFLHWWAMSGYTYQGCMDCLISYKFKDGQSAFARRFWEEAAGTGRLGYVFGCPVRSVVNERDAVRVTARDGREFVAKRLVCTIPLNVLSSVHFSPPLSPQRMAAANIGHVNQCVKVHAEVSCPDMRSWSGISYPFNKLAYAIGDGTTPAGNTHIVCLGGAHNHIQPEEDVEATKMAVENMSPGNMDIKRLVFHNWCKDEFAKGAWFFAPPQLLSKSLDELRCRHGNVLFANSDWALGWRGFIDGAIEEGTRAAVTVIEELRPAPAVRSHL

SEQ ID NO: 653 - DNA, 1485 bp, synthetic construct
  misc_feature 1..1485: note = Variant of monoamine oxidase
  source 1..1485: mol_type = other DNA
atgaccagccgcgacggctatcagtggaccccggaaacgggtctgacccagggcgtaccgtccctgggtgtcatttcgccgccgactaacatcgaagataccgataaggacgggccttgggatgtcattgtcattgggggcgggtattgtgggctgaccgcaacccgtgatttaaccgtcgcagggttcaagacgctgctgctggaggcccgtgatcgtattggtggccgctcctggagcagttttattgacggttacccgtatgagatgggtggcacttgggttcattggcatcaatctcacgtgtggcgtgaaatcacgcgttataaaatgcacggcgcgctgtctccgtcatttaacttttcacgtggcgtgaatcacttccaactgcgtaccaatccgaccaccagtacgtacatgacgcacgaagcggaggatgaactgctgcgtagcgcattgcataaattcaccaatgtcgacggcactaatggccgtacagtgttgccgttcccacatgatatgttttatgtgccggaatttcgcaagtatgacgaaatgtcatattccgaacgcattgaccagatccgcgacgaactgtctttgaacgaacgctctagtttagaggctttcattttattatgtagcggtggcggcctggaaaactccagctttggtgaatttctgcattggtgggcaatgtcgggttacacgtatcagggctgtatggattgtttaatctcctataaatttaaggatggccagagtgcgttcgcgcgtcgcttctgggaagaagccgctggcactggccgtctgggctatgtctttggttgtccggtgcgttctgtggtgaacgaacgcgacgcagtacgtgttaccgcacgtgacggtcgcgaattcgcagcgaaacgtttggtttgcacgattccgctgaacgtattgagttctgttcattttagcccaccactgtccccgcaacgcatggccgctgcgaacattggccatgttaaccagagcgtcaaagtgcatgcggaagtcagttgtccggatatgcgttcatggtcgggtatctcctatccgttcaacaaattagcctacgctatcggcgatggcacgaccccagcgggtaatacgcatattgtgtgccttgggggggcccataatcatatccagccggaagaggacgtggaagcaacgaagatggccgttgaaaacatgtcgcctgggaatatggatatcaaacgtctggtcttcgggaactggtgcaaggatgaatttgccaaaggcgcgtggttcttcgcccctccacagctgctgtcaaagagcctggatgaactgcgctgccgtcacggtaatgtcctgtttgcaaactccgattgggccttaggttggcgtggttttatcgatggtgctatcgaggagggcacccgcgcagcggttactgtaattgaggaactgcgtcctgcgcctgcggtgcgttcccacctg

SEQ ID NO: 654 - protein, 495 aa, synthetic construct
  REGION 1..495: note = Variant of monoamine oxidase
MTSRDGYQWTPETGLTQGVPSLGVISPPTNIEDTDKDGPWDVIVIGGGYCGLTATRDLTVAGFKTLLLEARDRIGGRSWSSFIDGYPYEMGGTWVHWHQSHVWREITRYKMHGALSPSFNFSRGVNHFQLRTNPTTSTYMTHEAEDELLRSALHKFTNVDGTNGRTVLPFPHDMFYVPEFRKYDEMSYSERIDQIRDELSLNERSSLEAFILLCSGGGLENSSFGEFLHWWAMSGYTYQGCMDCLISYKFKDGQSAFARRFWEEAAGTGRLGYVFGCPVRSVVNERDAVRVTARDGREFAAKRLVCTIPLNVLSSVHFSPPLSPQRMAAANIGHVNQSVKVHAEVSCPDMRSWSGISYPFNKLAYAIGDGTTPAGNTHIVCLGGAHNHIQPEEDVEATKMAVENMSPGNMDIKRLVFGNWCKDEFAKGAWFFAPPQLLSKSLDELRCRHGNVLFANSDWALGWRGFIDGAIEEGTRAAVTVIEELRPAPAVRSHL

SEQ ID NO: 655 - DNA, 1485 bp, synthetic construct
  misc_feature 1..1485: note = Variant of monoamine oxidase
  source 1..1485: mol_type = other DNA
atgaccagccgcgacggctatcagtggaccccggaaacgggtctgacccagggcgtaccgtccctgggtgtcatttcgccgccgactaacatcgaagataccgataaggacgggccttgggatgtcattgtcattgggggcgggtattgtgggctgaccgcaacccgtgatttaaccgtcgcagggttcaagacgctgctgctggaggcccgtgatcgtattggtggccgctcctggagcagtaatattgacggttacccgtatgagatgggtggcacttgggttcattggcatcaaccgcacgtgtggcgtgaaatcacgcgttataaaatgcacaacgcgctgtctccatcatttaacttttcacgtggcgtgaatcacttccaactgcgtaccaatccgaccaccagtacgtacatgacgcacgaagcgggggatgaactgatgcgtagcgcattgcataaattcaccaatgtcgacggcactaatggccgtacagtgttgccgttcccacatgatatgttttatgtgccggaatttcgcaagtatgacgaaatgtcatattccgaacgcattgaccagatccgcgacgaactgtctttgaacgaacgcactagtttagaggctttcattttattatgtagcggtggcaccctggaaaactccagctttggtgaatttctgcattggtgggcaatgtcgggttacacgtatcagggctgtatggattgtttaatctcctataaatttaaggatggccagagtgcgttcgcgcgtcgcttctgggaagaagccgctggcactggccgtctgggctatgtctttggttgtccggtgcgttctgtggtgaacgaacgcgacgcagtacgtgttaccgcacgtgacggtcgcgaattcgcagcgaaacgtttggtttgcacgattccgctgaacgtattgagttctgttcattttagcccaccactgtccccgcaacgcatggccgctgcgaacattggccatgttaaccagtgcgtcaaagtgcatgcggaagtcagttgtccggatatgcgttcatggtcgggtatctcctatccgttcaacaaattagcctacgctatcggcgatggcacgaccccagcgggtaatacgcatattgtgtgccttgggggggcccataatcatatccagccggaagaggacgtggaagcaacgaagatggccgttgaaaacatgtcgcctgggaatatggatatcaaacgtctggtcttccacaactggtgcaaggatgaatttgccaaaggcgcgtggttcttcgcccctccacagctgctgtcaaagagcctggatgaactgcgctgtcgtcacggtaatgtcctgtttgcaaactccgattgggccttaggttggcgtggttttatcgatggtgctatcgaggagggcacccgcgcagcggttactgtaattgaggaactgcgtcctgcgcctgcggtgcgttcccacctg

SEQ ID NO: 656 - protein, 495 aa, synthetic construct
  REGION 1..495: note = Variant of monoamine oxidase
MTSRDGYQWTPETGLTQGVPSLGVISPPTNIEDTDKDGPWDVIVIGGGYCGLTATRDLTVAGFKTLLLEARDRIGGRSWSSNIDGYPYEMGGTWVHWHQPHVWREITRYKMHNALSPSFNFSRGVNHFQLRTNPTTSTYMTHEAGDELMRSALHKFTNVDGTNGRTVLPFPHDMFYVPEFRKYDEMSYSERIDQIRDELSLNERTSLEAFILLCSGGTLENSSFGEFLHWWAMSGYTYQGCMDCLISYKFKDGQSAFARRFWEEAAGTGRLGYVFGCPVRSVVNERDAVRVTARDGREFAAKRLVCTIPLNVLSSVHFSPPLSPQRMAAANIGHVNQCVKVHAEVSCPDMRSWSGISYPFNKLAYAIGDGTTPAGNTHIVCLGGAHNHIQPEEDVEATKMAVENMSPGNMDIKRLVFHNWCKDEFAKGAWFFAPPQLLSKSLDELRCRHGNVLFANSDWALGWRGFIDGAIEEGTRAAVTVIEELRPAPAVRSHL

SEQ ID NO: 657 - DNA, 1485 bp, synthetic construct
  misc_feature 1..1485: note = Variant of monoamine oxidase
  source 1..1485: mol_type = other DNA
atgaccagccgcgacggctatcagtggaccccggaaacgggtctgacccagggcgtaccgtccctgggtgtcatttcgccgccgactaacatcgaagataccgataaggacgggccttgggatgtcattgtcattgggggcgggtattgtgggctgaccgcaacccgtgatttaaccgtcgcagggttcaagacgctgctgctggaggcccgtgatcgtattggtggccgctcctggagcagtcgcattgacggttacctgtatgagatgggtggcacttgggttcattggcatcaatctcacgtgtggcgtgaaatcacgcgttataaaatgcacaacgcgctgtctccatcatttaacttttcacgtggcgtgaatcacttccaactgcgtaccaatccgaccaccagtacgtacatgacgcacgaagcggaggatgaactgctgcgtagcgcattgcataaattcaccaatgtcgacggcactaatggccgtacagtgttgccgttcccacatgatatgttttatgtgccggaatttcgcaagtatgacgaaatgtcatattccgaacgcattgaccagatccgcgacgaactgtctttgaacgaacgctctagtttagaggctttcattttattatgtagcggtggcaccctggaaaactccagctttggtgaatttctgcattggtgggcaatgtcgggttacacgtatcagggctgtatggattgtttaatctcctataaatttaaggatggccagagtgcgttcgcgcgtcgcttctgggaagaagccgctggcactggccgtctgggctatgtctttggttgtccggtgcgttctgtggtgaacgaacgcgacgcagtacgtgttaccgcacgtgacggtcgcgaattcgcagcgaaacgtttggtttgcacgattccgctgaacgtattgagttctgttcattttagcccaccactgtccccgcaacgcatggccgctgcgaacattggccatgttaaccagggcgtcaaagtgcatgcggaagtcagttgtccggatatgcgttcatggtcgggtatctcctatccgttcaacaaattagcctacgctatcggcgatggcacgaccccagcgggtaatacgcatattgtgtgccttgggggggcccataatcatatccagccggaagaggacgtggaagcaacgaagatggccgttgaaaacatgtcgcctgggaatatggatatcaaacgtctggtcttccataactggagcaaggatgaatttgccaaaggcgcgtggttcttcgcccctccacagctgctgtcaaagagcctggatgaactgcgctgccgtcacggtaatgtcctgtttgcaaactccgattgggccttaggttggcgtggttttatcgatggtgctatcgaggagggcacccgcgcagcggttactgtaattgaggaactgcgtcctgcgcctgcggtgcgttcccacctg

SEQ ID NO: 658 - protein, 495 aa, synthetic construct
  REGION 1..495: note = Variant of monoamine oxidase
MTSRDGYQWTPETGLTQGVPSLGVISPPTNIEDTDKDGPWDVIVIGGGYCGLTATRDLTVAGFKTLLLEARDRIGGRSWSSRIDGYLYEMGGTWVHWHQSHVWREITRYKMHNALSPSFNFSRGVNHFQLRTNPTTSTYMTHEAEDELLRSALHKFTNVDGTNGRTVLPFPHDMFYVPEFRKYDEMSYSERIDQIRDELSLNERSSLEAFILLCSGGTLENSSFGEFLHWWAMSGYTYQGCMDCLISYKFKDGQSAFARRFWEEAAGTGRLGYVFGCPVRSVVNERDAVRVTARDGREFAAKRLVCTIPLNVLSSVHFSPPLSPQRMAAANIGHVNQGVKVHAEVSCPDMRSWSGISYPFNKLAYAIGDGTTPAGNTHIVCLGGAHNHIQPEEDVEATKMAVENMSPGNMDIKRLVFHNWSKDEFAKGAWFFAPPQLLSKSLDELRCRHGNVLFANSDWALGWRGFIDGAIEEGTRAAVTVIEELRPAPAVRSHL

SEQ ID NO: 659 - DNA, 1485 bp, synthetic construct
  misc_feature 1..1485: note = Variant of monoamine oxidase
  source 1..1485: mol_type = other DNA
atgaccagccgcgacggctatcagtggaccccggaaacgggtctgacccagggcgtaccgtccctgggtgtcatttcgccgccgactaacatcgaagataccgataaggacgggccttgggatgtcattgtcattgggggcgggtattgtgggctgaccgcaacccgtgatttaaccgtcgcagggttcaagacgctgctgctggaggcccgtgatcgtattggtggccgctcctggagcagtaatattgacggttacccgtatgagatgggtggcacttgggttcattggcatcaaccgcacgtgtggcgtgaaatcacgcgttataaaatgcacaacgcgctgtctccatcatttaacttttcacgtggcgtgaatcacttccaactgcgtaccaatccgaccaccagtacgtacatgacgcacgtagcgggggatgaactgatgcgtagcgcattgcataaattcaccaatgtcgacggcactaatggccgtacagtgttgccgttcccacatgatatgttttatgtgccggaatttcgcaagtatgacgaaatgtcatattccgaacgcattgaccagatccgcgacgaactgtctttgaacgaacgctctagtttagaggctttcattttattatgtagcggtggcaccctggaaaactccagctttggtgaatttctgcattggtgggcaatgtcgggttacacgtatcagggctgtatggattgtttaatttcctataaatttaaggatggccagagtgcgttcgcgcgtcgcttctgggaagaagccgctggcactggccgtctgggctatgtctttggttgcccggtgcgttctgtggtgaacgaacgcgacgcagtacgtgttaccgcacgtgacggtcgcgaattcgcagcgaaacgtttggtttgcacgattccgctgaacgtattgagttctgttcattttagcccaccactgtccccgcaacgcatggccgctgcgaacattggccatgttaaccagtgcgtcaaagtgcatgcggaagtcagtaacccagatatgcgttcatggtcgggtatctcctatccgttcaacaaattagcctacgctatcggcgatggcacgaccccagcgggtaatacgcatattgtgtgccttgggggggcccataatcatatccagccggaagaggacgtggaagcaacgaagatggccgttgaaaacatgtcgcctgggaatatggatatcaaacgtctggtcttccacaactggtgcaaggatgaatttgccaaaggcgcgtggttcttcgcccctccacagctgctgtcaaagagcctggatgaactgcgcgcacgtcacggtaatgtcctgtttgcaaactccgattgggccttaggttggcgtggttttatcgatggtgctatcgaggagggcacccgcgcagcggttactgtaattgaggaactgcgtcctgcgcctgcggtgcgttcccacctg

SEQ ID NO: 660 - protein, 495 aa, synthetic construct
  REGION 1..495: note = Variant of monoamine oxidase
MTSRDGYQWTPETGLTQGVPSLGVISPPTNIEDTDKDGPWDVIVIGGGYCGLTATRDLTVAGFKTLLLEARDRIGGRSWSSNIDGYPYEMGGTWVHWHQPHVWREITRYKMHNALSPSFNFSRGVNHFQLRTNPTTSTYMTHVAGDELMRSALHKFTNVDGTNGRTVLPFPHDMFYVPEFRKYDEMSYSERIDQIRDELSLNERSSLEAFILLCSGGTLENSSFGEFLHWWAMSGYTYQGCMDCLISYKFKDGQSAFARRFWEEAAGTGRLGYVFGCPVRSVVNERDAVRVTARDGREFAAKRLVCTIPLNVLSSVHFSPPLSPQRMAAANIGHVNQCVKVHAEVSNPDMRSWSGISYPFNKLAYAIGDGTTPAGNTHIVCLGGAHNHIQPEEDVEATKMAVENMSPGNMDIKRLVFHNWCKDEFAKGAWFFAPPQLLSKSLDELRARHGNVLFANSDWALGWRGFIDGAIEEGTRAAVTVIEELRPAPAVRSHL

SEQ ID NO: 661 - DNA, 1485 bp, synthetic construct
  misc_feature 1..1485: note = Variant of monoamine oxidase
  source 1..1485: mol_type = other DNA
atgaccagccgcgacggctatcagtggaccccggaaacgggtctgacccagggcgtaccgtccctgggtgtcatttcgccgccgactaacatcgaagataccgataaggacgggccttgggatgtcattgtcattgggggcgggtattgtgggctgaccgcaacccgtgatttaaccgtcgcagggttcaagacgctgctgctggaggcccgtgatcgtattggtggccgctcctggagcagtaatattgacggttacccgtatgagatgggtggcacttgggttcattggcatcaatcgcacgtgtggcgtgaaatcacgcgttataaaatgcacaacgcgctgtctccatcatttaacttttcacgtggcgtgaatcacttccaactgcgtaccaatccgaccaccagtacgtacatgacgcacgaagcgggggctgaactgatgcgtagcgcattgcataaattcaccaatgtcgacggcactaatggccgtacagtgttgccgttcccacatgatatgttttatgtgccggaatttcgcaagtatgacgaaatgtcatattccgaacgcattgaccagatccgcgacgaactgtctttgaacgaacgctctagtttagaggctttcattttattatgtagcggtggcaccctggaaaactccagctttggtgaatttctgcattggtgggcaatgtcgggttacacgtatcagggctgtatggattgtttaatctcctataaatttaaggatggccagagtgcgttcgcgcgtcgcttctgggaagaagccgctggcactggccgtctgggctatgtctttggttgtccggtgcgttctgtggtgaacgaacgcgacgcagtacgtgttaccgcacgtgacggtcgcgaattcgcagcgaaacgtttggtttgcacgattccgctgaacgtattgagttctgttcattttagcccaccactgtccccgcaacgcatggccgctgcgaacattggccatgttaaccagtgcgtcaaagtgcatgcggaagtcagtgacaaggatatgcgttcatggtcgggtatctcctatccgttcaacaaattagcctacgctatcggcgatggcacgaccccagcgggtaatacgcatattgtgtgccttgggggggcccataatcatatccagccggaagaggacgtggaagcaacgaagatggccgttgaaaacatgtcgcctgggaatatggatatcaaacgtctggtcttccacaactggtgcaaggatgaatttgccaaaggcgcgtggttcttcgcccctccacagctgctgtcaaagagcctggatgaactgcgctgccgtcacggtaatgtcctgtttgcaaactccgattgggccttaggttggcgtggttttatcgatggtgctatcgaggagggcacccgcgcagcggttactgtaattgaggaactgcgtcctgcgcctgcggtgcgttcccacctg

SEQ ID NO: 662 - protein, 495 aa, synthetic construct
  REGION 1..495: note = Variant of monoamine oxidase
MTSRDGYQWTPETGLTQGVPSLGVISPPTNIEDTDKDGPWDVIVIGGGYCGLTATRDLTVAGFKTLLLEARDRIGGRSWSSNIDGYPYEMGGTWVHWHQSHVWREITRYKMHNALSPSFNFSRGVNHFQLRTNPTTSTYMTHEAGAELMRSALHKFTNVDGTNGRTVLPFPHDMFYVPEFRKYDEMSYSERIDQIRDELSLNERSSLEAFILLCSGGTLENSSFGEFLHWWAMSGYTYQGCMDCLISYKFKDGQSAFARRFWEEAAGTGRLGYVFGCPVRSVVNERDAVRVTARDGREFAAKRLVCTIPLNVLSSVHFSPPLSPQRMAAANIGHVNQCVKVHAEVSDKDMRSWSGISYPFNKLAYAIGDGTTPAGNTHIVCLGGAHNHIQPEEDVEATKMAVENMSPGNMDIKRLVFHNWCKDEFAKGAWFFAPPQLLSKSLDELRCRHGNVLFANSDWALGWRGFIDGAIEEGTRAAVTVIEELRPAPAVRSHL

SEQ ID NO: 663 - DNA, 1485 bp, synthetic construct
  misc_feature 1..1485: note = Variant of monoamine oxidase
  source 1..1485: mol_type = other DNA
atgaccagccgcgacggctatcagtggaccccggaaacgggtctgacccagggcgtaccgtccctgggtgtcatttcgccgccgactaacatcgaagataccgataaggacgggccttgggatgtcattgtcattgggggcgggtattgtgggctgaccgcaacccgtgatttaaccgtcgcagggttcaagacgctgctgctggaggcccgtgatcgtattggtggccgctcctggagcagtaatattgacggttacccgtatgagatgggtggcacttgggttcattggcatcaaccgcacgtgtggcgtgaaatcacgcgttataaaatgcacaacgcgctgtctccatcatttaacttttcacgtggcgtgaatcacttccaactgcgtaccaatccgaccaccagtacgtacatgacgcacgaagcggaggatgaactgctgcgtagcgcattgcataaattcaccaatgtcgacggcactaatggccgtacagtgttgccgttcccacatgatatgttttatgtgccggaatttcgcaagtatgacgaaatgtcatattccgaacgcattgaccagatccgcgacgaactgtctttgaacgaacgctctagtttagaggctttcattttattatgtagcggtggcaccctggaaaactccagctttggtgaatttctgcattggtgggcaatgtcgggttacacgtatcagggctgtattgattgtttaatttcctataaatttaaggatggccagagtgcgttcgcgcgtcgcttctgggaagaagccgctggcactggccgtctgggctatgtctttggttgtccggtgcgttctgtggtgaacgaacgcgacgcagtacgtgttaccgcacgtgacggtcgcgaattcgcagcgaaacgtttggtttgcacgattccgctgaacgtattgagttctgttcattttagcccaccactgtccccgcaacgcatggccgctgcgaacattggccatgttaaccagtgcgtcaaagtgcatgcggaagtcagtgacaaggatatgcgttcatggtcgggtatctcctatccgttcaacaaattagcctacgctatcggcgatggcacgaccccagcgggtaatacgcatattgtgtgccttgggggggcccataatcatatccagccggaagaggacgtggaagcaacgaagatggccgttgaaaacatgtcgcctgggaatatggatatcaaacgtctggtcttccacaactggtgcaaggatgaatttgccaaaggcgcgtggttcttcgcccctccacagctgctgtcaaagagcctggatgaacgtcgcgcacgtcacggtaatgtcctgtttgcaaactccgattgggccttaggttggcgtggttttatcgatggtgctatcgaggagggcacccgcgcagcggttactgtaattgaggaactgcgtcctgcgcctgcggtgcgttcccacctg

SEQ ID NO: 664 - protein, 495 aa, synthetic construct
  REGION 1..495: note = Variant of monoamine oxidase
MTSRDGYQWTPETGLTQGVPSLGVISPPTNIEDTDKDGPWDVIVIGGGYCGLTATRDLTVAGFKTLLLEARDRIGGRSWSSNIDGYPYEMGGTWVHWHQPHVWREITRYKMHNALSPSFNFSRGVNHFQLRTNPTTSTYMTHEAEDELLRSALHKFTNVDGTNGRTVLPFPHDMFYVPEFRKYDEMSYSERIDQIRDELSLNERSSLEAFILLCSGGTLENSSFGEFLHWWAMSGYTYQGCIDCLISYKFKDGQSAFARRFWEEAAGTGRLGYVFGCPVRSVVNERDAVRVTARDGREFAAKRLVCTIPLNVLSSVHFSPPLSPQRMAAANIGHVNQCVKVHAEVSDKDMRSWSGISYPFNKLAYAIGDGTTPAGNTHIVCLGGAHNHIQPEEDVEATKMAVENMSPGNMDIKRLVFHNWCKDEFAKGAWFFAPPQLLSKSLDERRARHGNVLFANSDWALGWRGFIDGAIEEGTRAAVTVIEELRPAPAVRSHL

SEQ ID NO: 665 - DNA, 1485 bp, synthetic construct
  misc_feature 1..1485: note = Variant of monoamine oxidase
  source 1..1485: mol_type = other DNA
atgaccagccgcgacggctatcagtggaccccggaaacgggtctgacccagggcgtaccgtccctgggtgtcatttcgccgccgactaacatcgaagataccgataaggacgggccttgggatgtcattgtcattgggggcgggtattgtgggctgaccgcaacccgtgatttaaccgtcgcagggttcaagacgctgctgctggaggcccgtgatcgtattggtggccgctcctggagcagtaatattgacggttacccgtatgagatgggtggcacttgggttcattggcatcaaccgcacgtgtggcgtgaaatcacgcgttataaaatgcacaacgcgctgtctccatcatttaacttttcacgtggcgtgaatcacttccaactgcgtaccaatccgaccaccagtacgtacatgacgcacgaagcgggggatgaactgatgcgtagcgcattgcataaattcaccaatgtcgacggcactaatggccgtacagtgttgccgttcccacatgatatgttttatgtgccggaatttcgcaagtatgacgaaatgtcatattccgaacgcattgaccagatccgcgacgatctgtctttgaacgaacgctctagtttagaggctttcattttattatgtagcggtggcaccctggaaaactccagctttggtgaatttctgcattggtgggcaatgtcgggttacacgtatcagggctgtattgattgtttaatgtcctataaatttaaggatggccagagtgcgttcgcgcgtcgcttctgggaagaagccgctggcactggccgtctgggctatgtctttggttgcccggtgcgttctgtggtgaacgaacgcgacgcagtacgtgttaccgcacgtgacggtcgcgaattcgcagcgaaacgtttggtttgcacgattccgctgaacgtattgagttctgttcattttagcccaccactgtccccgcaacgcatggccgctgcgaacattggccatgttaaccagtgcgtcaaagtgcatgcggaagtcagttgcccagatatgcgttcatggtcgggtatctcctatccgttcaacaaattagcctacgctatcggcgatggcacgaccccagcgggtaatacgcatattgtgtgccttgggggggcccataatcatatccagccggaagaggacgtggaagcaacgaagatggccgttgaaaacatgtcgcctgggaatatggatatcaaacgtctggtcttccacaactggtgcaaggatgaatttgccaaaggcgcgtggttcttcgcccctccacagctgctgtcaaagagcctggatgaacgtcgcgcacgtcacggtaatgtcctgtttgcaaactccgattgggccttaggttggcgtggttttatcgatggtgctatcgaggagggcacccgcgcagcggttactgtaattgaggaactgcgtcctgcgcctgcggtgcgttcccacctg

SEQ ID NO: 666 - protein, 495 aa, synthetic construct
  REGION 1..495: note = Variant of monoamine oxidase
MTSRDGYQWTPETGLTQGVPSLGVISPPTNIEDTDKDGPWDVIVIGGGYCGLTATRDLTVAGFKTLLLEARDRIGGRSWSSNIDGYPYEMGGTWVHWHQPHVWREITRYKMHNALSPSFNFSRGVNHFQLRTNPTTSTYMTHEAGDELMRSALHKFTNVDGTNGRTVLPFPHDMFYVPEFRKYDEMSYSERIDQIRDDLSLNERSSLEAFILLCSGGTLENSSFGEFLHWWAMSGYTYQGCIDCLMSYKFKDGQSAFARRFWEEAAGTGRLGYVFGCPVRSVVNERDAVRVTARDGREFAAKRLVCTIPLNVLSSVHFSPPLSPQRMAAANIGHVNQCVKVHAEVSCPDMRSWSGISYPFNKLAYAIGDGTTPAGNTHIVCLGGAHNHIQPEEDVEATKMAVENMSPGNMDIKRLVFHNWCKDEFAKGAWFFAPPQLLSKSLDERRARHGNVLFANSDWALGWRGFIDGAIEEGTRAAVTVIEELRPAPAVRSHL

SEQ ID NO: 667 - DNA, 1485 bp, synthetic construct
  misc_feature 1..1485: note = Variant of monoamine oxidase
  source 1..1485: mol_type = other DNA
atgaccagccgcgacggctatcagtggaccccggaaacgggtctgacccagggcgtaccgtccctgggtgtcatttcgccgccgactaacatcgaagataccgataaggacgggccttgggatgtcattgtcattgggggcgggtattgtgggctgaccgcaacccgtgatttaaccgtcgcagggttcaagacgctgctgctggaggcccgtgatcgtattggtggccgctcctggagcagtaatattgacggttacccgtatgagatgggtggcacttgggttcattggcatcaaccgcacgtgtggcgtgaaatcacgcgttataaaatgcacaacgcgctgtctccatcatttaacttttcacgtggcgtgaatcacttccaactgcgtaccaatccgaccaccagtacgtacatgacgcacgaagcggaggatgaactgctgcgtagcgcattgcataaattcaccaatgtcgacggcactaatggccgtacagtgttgccgttcccacatgatatgttttatgtgccggaatttcgcaagtatgacgaaatgtcatattccgaacgcattgaccagatccgcgacgaactgtctttgaacgaacgctctagtttagaggctttcattttattatgtagcggtggcaccctggaaaactccagctttggtgaatttctgcattggtgggcaatgtcgggttacacgtatcagggctgtattgattgtttaatttcctataaatttaaggatggccagagtgcgttcgcgcgtcgcttctgggaagaagccgctggcactggccgtctgggctatgtctttggttgtccggtgcgttctgtggtgaacgaacgcgacgcagtacgtgttaccgcacgtgacggtcgcgaattcgcagcgaaacgtttggtttgcacgattccgctgaacgtattgagttctgttcattttagcccaccactgtccccgcaacgcatggccgctgcgaacattggccatgttaaccagtgcgtcaaagtgcatgcggaagtcagtgacaaggatatgcgttcatggtcgggtatctcctatccgttcaacaaattagcctacgctatcggcgatggcacgaccccagcgggtaatacgcatattgtgtgccttgggggggcccataatcatatccagccggaagaggacgtggaagcaacgaagatggccgttgaaaacatgtcgcctgggaatatggatatcaaacgtctggtcttccacaactggtgcaaggatgaatttgccaaaggcgcgtggttcttcgcccctccacagctgctgtcaaagagcctggatgaacgtcgctgtcgtcacggtaatgtcctgtttgcaaactccgattgggccttaggttggcgtggttttatcgatggtgctatcgaggagggcacccgcgcagcggttactgtaattgaggaactgcgtcctgcgcctgcggtgcgttcccacctg

SEQ ID NO: 668 - protein, 495 aa, synthetic construct
  REGION 1..495: note = Variant of monoamine oxidase
MTSRDGYQWTPETGLTQGVPSLGVISPPTNIEDTDKDGPWDVIVIGGGYCGLTATRDLTVAGFKTLLLEARDRIGGRSWSSNIDGYPYEMGGTWVHWHQPHVWREITRYKMHNALSPSFNFSRGVNHFQLRTNPTTSTYMTHEAEDELLRSALHKFTNVDGTNGRTVLPFPHDMFYVPEFRKYDEMSYSERIDQIRDELSLNERSSLEAFILLCSGGTLENSSFGEFLHWWAMSGYTYQGCIDCLISYKFKDGQSAFARRFWEEAAGTGRLGYVFGCPVRSVVNERDAVRVTARDGREFAAKRLVCTIPLNVLSSVHFSPPLSPQRMAAANIGHVNQCVKVHAEVSDKDMRSWSGISYPFNKLAYAIGDGTTPAGNTHIVCLGGAHNHIQPEEDVEATKMAVENMSPGNMDIKRLVFHNWCKDEFAKGAWFFAPPQLLSKSLDERRCRHGNVLFANSDWALGWRGFIDGAIEEGTRAAVTVIEELRPAPAVRSHL

SEQ ID NO: 669 - DNA, 1485 bp, synthetic construct
  misc_feature 1..1485: note = Variant of monoamine oxidase
  source 1..1485: mol_type = other DNA
atgaccagccgcgacggctatcagtggaccccggaaacgggtctgacccagggcgtaccgtccctgggtgtcatttcgccgccgactaacatcgaagataccgataaggacgggccttgggatgtcattgtcattgggggcgggtattgtgggctgaccgcaacccgtgatttaaccgtcgcagggttcaagacgctgctgctggaggcccgtgatcgtattggtggccgctcctggagcagtaatattgacggttacccgtatgagatgggtggcacttgggttcattggcatcaatcgcacgtgtggcgtgaaatcacgcgttataaaatgcacaacgcgctgtctccatcatttaacttttcacgtggcgtgaatcacttccaactgcgtaccaatccgaccaccagtacgtacatgacgcacgaagcgtcggatgaactgatgcgtagcgcattgcataaattcaccaatgtcgacggcactaatggccgtacagtgttgccgttcccacatgatatgttttatgtgccggaatttcgcaagtatgacgaaatgtcatattccgaacgcattgaccagatccgcgacgatctgtctttgaacgaacgcactagtttagaggctttcattttattatgtagcggtggcaccctggaaaactccagctttggtgaatttctgcattggtgggcaatgtcgggttacacgtatcagggctgtatggattgtttaatctcctataaatttaaggatggccagagtgcgttcgcgcgtcgcttctgggaagaagccgctggcactggccgtctgggctatgtctttggttgcccggtgcgttctgtggtgaacgaacgcgacgcagtacgtgttaccgcacgtgacggtcgcgaattcgcagcgaaacgtttggtttgcacgattccgctgaacgtattgagttctgttcattttagcccaccactgtccccgcaacgcatggccgctgcgaacattggccatgttaaccagtgcgtcaaagtgcatgcggaagtcagttgcaaggatatgcgttcatggtcgggtatctcctatccgttcaacaaattagcctacgctatcggcgatggcacgaccccagcgggtaatacgcatattgtgtgccttgggggggcccataatcatatccagccggaagaggacgtggaagcaacgaagatggccgttgaaaacatgtcgcctgggaatatggatatcaaacgtctggtcttccacaactggtgcaaggatgaatttgccaaaggcgcgtggttcttcgcccctccacagctgctgtcaaagagcctggatgaactgcgctgtcgtcacggtaatgtcctgtttgcaaactccgattgggccttaggttggcgtggttttatcgatggtgctatcgaggagggcacccgcgcagcggttactgtaattgaggaactgcgtcctgcgcctgcggtgcgttcccacctg

SEQ ID NO: 670 - protein, 495 aa, synthetic construct
  REGION 1..495: note = Variant of monoamine oxidase
MTSRDGYQWTPETGLTQGVPSLGVISPPTNIEDTDKDGPWDVIVIGGGYCGLTATRDLTVAGFKTLLLEARDRIGGRSWSSNIDGYPYEMGGTWVHWHQSHVWREITRYKMHNALSPSFNFSRGVNHFQLRTNPTTSTYMTHEASDELMRSALHKFTNVDGTNGRTVLPFPHDMFYVPEFRKYDEMSYSERIDQIRDDLSLNERTSLEAFILLCSGGTLENSSFGEFLHWWAMSGYTYQGCMDCLISYKFKDGQSAFARRFWEEAAGTGRLGYVFGCPVRSVVNERDAVRVTARDGREFAAKRLVCTIPLNVLSSVHFSPPLSPQRMAAANIGHVNQCVKVHAEVSCKDMRSWSGISYPFNKLAYAIGDGTTPAGNTHIVCLGGAHNHIQPEEDVEATKMAVENMSPGNMDIKRLVFHNWCKDEFAKGAWFFAPPQLLSKSLDELRCRHGNVLFANSDWALGWRGFIDGAIEEGTRAAVTVIEELRPAPAVRSHL

SEQ ID NO: 671 - DNA, 1485 bp, synthetic construct
  misc_feature 1..1485: note = Variant of monoamine oxidase
  source 1..1485: mol_type = other DNA
atgaccagccgcgacggctatcagtggaccccggaaacgggtctgacccagggcgtaccgtccctgggtgtcatttcgccgccgactaacatcgaagataccgataaggacgggccttgggatgtcattgtcattgggggcgggtattgtgggctgaccgcaacccgtgatttaaccgtcgcagggttcaagacgctgctgctggaggcccgtgatcgtattggtggccgctcctggagcagtaatattgacggttacccgtatgagatgggtggcacttgggttcattggcatcaaccgcacgtgtggcgtgaaatcacgcgttataaaatgcacaacgcgctgtctccatcatttaacttttcacgtggcgtgaatcacttccaactgcgtaccaatccgaccaccagtacgtacatgacgcacgaagcgtcggatgaactgctgcgtagcgcattgcataaattcaccaatgtcgacggcactaatggccgtacagtgttgccgttcccacatgatatgttttatgtgccggaatttcgcaagtatgacgaaatgtcatattccgaacgcattgaccagatccgcgacgaactgtctttgaacgaacgctctagtttagaggctttcattttattatgtagcggtggcaccctggaaaactccagctttggtgaatttctgcattggtgggcaatgtcgggttacacgtatcagggctgtatggattgtttaatgtcctataaatttaaggatggccagagtgcgttcgcgcgtcgcttctgggaagaagccgctggcactggccgtctgggctatgtctttggttgcccggtgcgttctgtggtgaacgaacgcgacgcagtacgtgttaccgcacgtgacggtcgcgaattcgcagcgaaacgtttggtttgcacgattccgctgaacgtattgagttctgttcattttagcccaccactgtccccgcaacgcatggccgctgcgaacattggccatgttaaccagtgcgtcaaagtgcatgcggaagtcagtaacaaggatatgcgttcatggtcgggtatctcctatccgttcaacaaattagcctacgctatcggcgatggcacgaccccagcgggtaatacgcatattgtgtgccttgggggggcccataatcatatccagccggaagaggacgtggaagcaacgaagatggccgttgaaaacatgtcgcctgggaatatggatatcaaacgtctggtcttccacaactggtgcaaggatgaatttgccaaaggcgcgtggttcttcgcccctccacagctgctgtcaaagagcctggatgaacgtcgctgtcgtcacggtaatgtcctgtttgcaaactccgattgggccttaggttggcgtggttttatcgatggtgctatcgaggagggcacccgcgcagcggttactgtaattgaggaactgcgtcctgcgcctgcggtgcgttcccacctg

SEQ ID NO: 672 - protein, 495 aa, synthetic construct
  REGION 1..495: note = Variant of monoamine oxidase
MTSRDGYQWTPETGLTQGVPSLGVISPPTNIEDTDKDGPWDVIVIGGGYCGLTATRDLTVAGFKTLLLEARDRIGGRSWSSNIDGYPYEMGGTWVHWHQPHVWREITRYKMHNALSPSFNFSRGVNHFQLRTNPTTSTYMTHEASDELLRSALHKFTNVDGTNGRTVLPFPHDMFYVPEFRKYDEMSYSERIDQIRDELSLNERSSLEAFILLCSGGTLENSSFGEFLHWWAMSGYTYQGCMDCLMSYKFKDGQSAFARRFWEEAAGTGRLGYVFGCPVRSVVNERDAVRVTARDGREFAAKRLVCTIPLNVLSSVHFSPPLSPQRMAAANIGHVNQCVKVHAEVSNKDMRSWSGISYPFNKLAYAIGDGTTPAGNTHIVCLGGAHNHIQPEEDVEATKMAVENMSPGNMDIKRLVFHNWCKDEFAKGAWFFAPPQLLSKSLDERRCRHGNVLFANSDWALGWRGFIDGAIEEGTRAAVTVIEELRPAPAVRSHL

SEQ ID NO: 673 - DNA, 1485 bp, synthetic construct
  misc_feature 1..1485: note = Variant of monoamine oxidase
  source 1..1485: mol_type = other DNA
atgaccagccgcgacggctatcagtggaccccggaaacgggtctgacccagggcgtaccgtccctgggtgtcatttcgccgccgactaacatcgaagataccgataaggacgggccttgggatgtcattgtcattgggggcgggtattgtgggctgaccgcaacccgtgatttaaccgtcgcagggttcaagacgctgctgctggaggcccgtgatcgtattggtggccgctcctgggtgagtaatattgacggttacccgtatgagatgggtggcacttgggttcattggcatcaatctcacgtgtggcgtgaaatcacgcgttataaaatgcacaacgcgctgtctccatcatttaacttttcacgtggcgtgaatcacttccaactgcgtaccaatccgaccaccagtacgtacatgacgcacgaagcggaggatgaactgctgcgtagcgcattgcataaattcaccaatgtcgacggcactaatggccgtacagtgttgccgttcccacatgatatgttttatgtgccggaatttcgcaagtatgatgaaatgtcatattccgaacgcattgaccagatccgcgacgaactgtctttgaacgaacgctctagtttagaggctttcattttattatgtagcggtggcaccctggaaaactccagctttggtgaatttctgcattggtgggcaatgtcgggttacacgtaccagggctgtatggattgtttaatctcctataaatttaaggatggccagagtgcgttcgcgcgtcgcttctgggaagaagccgctggcactggccgtctgggctatgtctttggttgtccggtgcgttctgtggtgaacgaacgcgacgcagtacgtgttaccgcacgtgacggtcgcgaattcgcagcgaaacgtttggtttgcacgattccgctgaacgtattgagttctgttcattttagcccaccactgtccccgcaacgcatggccgctgcgaacggcggccatgttaaccagtgcgtcaaagtgcatgcggaagtcagttgtccggatatgcgttcatggtcgggtatctcctatccgttcaacaaattagcctacgctatcggcgatggcacgaccccagcgggtaatacgcatattgtgtgccttgggggggccgagaatcatatccagccggaagaggacgtggaagcaacgaagatggccgttgaaaacatgtcgcctgggaatatggatatcaaacgtctggtcttccacaactggtgcaaggatgaatttgccaaaggcgcgtggttcttcgcccctccacagctgctgtcaaagagcctggatgaactgcgctgccgtcacggtaatgtcctgtttgcaaactccgattgggccttaggttggcgtggttttatcgatggtgctatcgaggagggcacccgcgcagcggttactgtaattgaggaactgcgtcctgcgcctgcggtgcgttcccacctg

SEQ ID NO: 674 - protein, 495 aa, synthetic construct
  REGION 1..495: note = Variant of monoamine oxidase
MTSRDGYQWTPETGLTQGVPSLGVISPPTNIEDTDKDGPWDVIVIGGGYCGLTATRDLTVAGFKTLLLEARDRIGGRSWVSNIDGYPYEMGGTWVHWHQSHVWREITRYKMHNALSPSFNFSRGVNHFQLRTNPTTSTYMTHEAEDELLRSALHKFTNVDGTNGRTVLPFPHDMFYVPEFRKYDEMSYSERIDQIRDELSLNERSSLEAFILLCSGGTLENSSFGEFLHWWAMSGYTYQGCMDCLISYKFKDGQSAFARRFWEEAAGTGRLGYVFGCPVRSVVNERDAVRVTARDGREFAAKRLVCTIPLNVLSSVHFSPPLSPQRMAAANGGHVNQCVKVHAEVSCPDMRSWSGISYPFNKLAYAIGDGTTPAGNTHIVCLGGAENHIQPEEDVEATKMAVENMSPGNMDIKRLVFHNWCKDEFAKGAWFFAPPQLLSKSLDELRCRHGNVLFANSDWALGWRGFIDGAIEEGTRAAVTVIEELRPAPAVRSHL

SEQ ID NO: 675 - DNA, 1485 bp, synthetic construct
  misc_feature 1..1485: note = Variant of monoamine oxidase
  source 1..1485: mol_type = other DNA
atgaccagccgcgacggctatcagtggaccccggaaacgggtctgacccagggcgtaccgtccctgggtgtcatttcgccgccgactaacatcgaagataccgataaggacgggccttgggatgtcattgtcattgggggcgggtattgtgggctgaccgcaacccgtgatttaaccgtcgcagggttcaagacgctgctgctggaggcccgtgatcgtattggtggccgctcctgggtgagtaatattgacggttacccgtatgagatgggtggcacttgggttcattggcatcaatctcacgtgtggcgtgaaatcacgcgttataaaatgcacaacgcgctgtctccatcatttaacttttcacgtggcgtgaatcacttccaactgcgtaccaatccgaccaccagtacgtacatgacgcacgaagcggaggatgaactgctgcgtagcgcattgcataaattcaccaatgtcgacggcactaatggccgtacagtgttgccgttcccacatgatatgttttatgtgccggaatttcgcaagtatgacgaaatgtcatattccgaacgcattgaccagatccgcgacgaactgtctttgaacgaacgctctagtttagaggctttcattttattatgtagcggtggcaccctggaaaactccagctttggtgaatttctgcattggtgggcaatgtcgggttacacgtatcagggctgtatggattgtttaatctcctataaatttaaggatggccagagtgcgttcgcgcgtcgcttctgggaagaagccgctggcactggccgtctgggctatgtctttggttgtccggtgcgttctgtggtggatgaacgcgacgcagtacgtgttaccgcacgtgacggtcgcgaattcgcagcgaaacgtttggtttgcacgattccgctgaacgtattgagttctgttcattttagcccaccactgtccccgcaacgcatggccgctgcgaacattggccatgttaaccagtgcgtcaaagtgcatgcggaagtcagttgtccggatatgcgttcatggtcgggtatctcctatccgttcaacaaattagcctacgctatcggcgatggcacgaccccagcgggtaatacgcatattgtgtgccttgggggggcccataatcatatccagccggaagaggacgtggaagcaacgaagatggccgttgaaaacatgtcgcctgggaatatggatatcaaacgtctggtcttccacaactggtgcaaggatgaatttgccaaaggcgcgtggttcttcgcccctccacagctgctgtcaaagagcctggatgaactgcgctgccgtcacggtaatgtcctgtttgcaaactccgattgggccttaggttggcgtggttttatcgatggtgctatcgaggagggcacccgcgcagcggttactgtaattgaggaactgcgtcctgcgcctgcggtgcgttcccacctg

SEQ ID NO: 676 - protein, 495 aa, synthetic construct
  REGION 1..495: note = Variant of monoamine oxidase
MTSRDGYQWTPETGLTQGVPSLGVISPPTNIEDTDKDGPWDVIVIGGGYCGLTATRDLTVAGFKTLLLEARDRIGGRSWVSNIDGYPYEMGGTWVHWHQSHVWREITRYKMHNALSPSFNFSRGVNHFQLRTNPTTSTYMTHEAEDELLRSALHKFTNVDGTNGRTVLPFPHDMFYVPEFRKYDEMSYSERIDQIRDELSLNERSSLEAFILLCSGGTLENSSFGEFLHWWAMSGYTYQGCMDCLISYKFKDGQSAFARRFWEEAAGTGRLGYVFGCPVRSVVDERDAVRVTARDGREFAAKRLVCTIPLNVLSSVHFSPPLSPQRMAAANIGHVNQCVKVHAEVSCPDMRSWSGISYPFNKLAYAIGDGTTPAGNTHIVCLGGAHNHIQPEEDVEATKMAVENMSPGNMDIKRLVFHNWCKDEFAKGAWFFAPPQLLSKSLDELRCRHGNVLFANSDWALGWRGFIDGAIEEGTRAAVTVIEELRPAPAVRSHL

SEQ ID NO: 677 - DNA, 1485 bp, synthetic construct
  misc_feature 1..1485: note = Variant of monoamine oxidase
  source 1..1485: mol_type = other DNA
atgaccagccgcgacggctatcagtggaccccggaaacgggtctgacccagggcgtaccgtccctgggtgtcatttcgccgccgactaacatcgaagataccgataaggacgggccttgggatgtcattgtcattgggggcgggtattgtgggctgaccgcaacccgtgatttaaccgtcgcagggttcaagacgctgctgctggaggcccgtgatcgtattggtggccgctcctggagcagtaacattgacggttacccgtatgagatgggtggcacttgggttcattggcatcaatctcacgtgtggcgtgaaatcacgcgttataaaatgcacaacgcgctgtctccatcatttaacttttcacgtggcgtgaatcacttccaactgcgtaccaatccgaccaccagtacgtacatgacgcacgaagcggaggatgaactgctgcgtagcgcattgcataaattcaccaatgtcgacggcactaatggccgtacagtgttgccgttcccacatgatatgttttatgtgccggaatttcgcaagtatgacgaaatgtcatattccgaacgcattgaccagatccgcgacgaactgtctttgaacgaacgctctagtttagaggctttcattttattatgtagcggtggcaccctggaaaactccagctttggtgaatttctgcattggtgggcaatgtcgggttacacgtatcagggctgtatggattgtttaatctcctataaatttaaggatggccagagtgcgttcgcgcgtcgcttctgggaagaagccgctggcactggccgtctgggctatgtctttggttgtccggtgcgttctgtggtgaacgaacgcgacgcagtacgtgttaccgcacgtgacggtcgcgaattcgcagcgaaacgtttggtttgcacgattccgctgaacgtattgagttctgttcattttagcccaccactgtccccgcaacgcatggccgctgcgaacattggccatgttaaccagggcgtcaaagtgcatgcggaagtcagttgtccggatatgcgttcatggtcgggtatctcctatccgttcaacaaattagcctacgctatcggcgatggcacgaccccagcgggtaatacgcatattgtgtgccttgggggggcccataatcatatccagccggaagaggacgtggaagcaacgaagatggccgttgaaaacatgtcgcctgggaatatggatatcaaacgtctggtcttcgggaactggtgcaaggatgaatttgccaaaggcgcgtggttcttcgcccctccacagctgctgtcaaagagcctggatgaactgcgctgccgtcacggtaatgtcctgtttgcaaactccgattgggccttaggttggcgtggttttatcgatggtgctatcgaggagggcacccgcgcagcggttactgtaattgaggaactgcgtcctgcgcctgcggtgcgttcccacctg

SEQ ID NO: 678 - protein, 495 aa, synthetic construct
  REGION 1..495: note = Variant of monoamine oxidase
MTSRDGYQWTPETGLTQGVPSLGVISPPTNIEDTDKDGPWDVIVIGGGYCGLTATRDLTVAGFKTLLLEARDRIGGRSWSSNIDGYPYEMGGTWVHWHQSHVWREITRYKMHNALSPSFNFSRGVNHFQLRTNPTTSTYMTHEAEDELLRSALHKFTNVDGTNGRTVLPFPHDMFYVPEFRKYDEMSYSERIDQIRDELSLNERSSLEAFILLCSGGTLENSSFGEFLHWWAMSGYTYQGCMDCLISYKFKDGQSAFARRFWEEAAGTGRLGYVFGCPVRSVVNERDAVRVTARDGREFAAKRLVCTIPLNVLSSVHFSPPLSPQRMAAANIGHVNQGVKVHAEVSCPDMRSWSGISYPFNKLAYAIGDGTTPAGNTHIVCLGGAHNHIQPEEDVEATKMAVENMSPGNMDIKRLVFGNWCKDEFAKGAWFFAPPQLLSKSLDELRCRHGNVLFANSDWALGWRGFIDGAIEEGTRAAVTVIEELRPAPAVRSHL

SEQ ID NO: 679 - DNA, 1485 bp, synthetic construct
  misc_feature 1..1485: note = Variant of monoamine oxidase
  source 1..1485: mol_type = other DNA
atgaccagccgcgacggctatcagtggaccccggaaacgggtctgacccagggcgtaccgtccctgggtgtcatttcgccgccgactaacatcgaagataccgataaggacgggccttgggatgtcattgtcattgggggcgggtattgtgggctgaccgcaacccgtgatttaaccgtcgcagggttcaagacgctgctgctggaggcccgtgatcgtattggtggccgctcctggagcagtaatattgacggttacccgtatgagatgggtggcacttgggttcattggcatcaatcgcacgtgtggcgtgaaatcacgcgttataaaatgcacaacgcgctgtctccatcatttaacttttcacgtggcgtgaatcacttccaactgcgtaccaatccgaccaccagtacgtacatgacgcacgaagcgggggatgaactgatgcgtagcgcattgcataaattcaccaatgtcgacggcactaatggccgtacagtgttgccgttcccacatgatatgttttatgtgccggaatttcgcaagtatgacgaaatgtcatattccgaacgcattgaccagatccgcgacgaactgtctttgaacgaacgctctagtttagaggctttcattttattatgtagcggtggcaccctggaaaactccagctttggtgaatttctgcattggtgggcaatgtcgggttacacgtatcagggctgtattgattgtttaatttcctataaatttaaggatggccagagtgcgttcgcgcgtcgcttctgggaagaagccgctggcactggccgtctgggctatgtctttggttgtccggtgcgttctgtggtgaacgaacgcgacgcagtacgtgttaccgcacgtgacggtcgcgaattcgcagcgaaacgtttggtttgcacgattccgctgaacgtattgagttctgttcattttagcccaccactgtccccgcaacgcatggccgctgcgaacattggccatgttaaccagtgcgtcaaagtgcatgcggaagtcagttgcaaggatatgcgttcatggtcgggtatctcctatccgttcaacaaattagcctacgctatcggcgatggcacgaccccagcgggtaatacgcatattgtgtgccttgggggggcccataatcatatccagccggaagaggacgtggaagcaacgaagatggccgttgaaaacatgtcgcctgggaatatggatatcaaacgtctggtcttccacaactggtgcaaggatgaatttgccaaaggcgcgtggttcttcgcccctccacagctgctgtcaaagagcctggatgaactgcgctgtcgtcacggtaatgtcctgtttgcaaactccgattgggccttaggttggcgtggttttatcgatggtgctatcgaggagggcacccgcgcagcggttactgtaattgaggaactgcgtcctgcgcctgcggtgcgttcccacctg

SEQ ID NO: 680 - protein, 495 aa, synthetic construct
  REGION 1..495: note = Variant of monoamine oxidase
MTSRDGYQWTPETGLTQGVPSLGVISPPTNIEDTDKDGPWDVIVIGGGYCGLTATRDLTVAGFKTLLLEARDRIGGRSWSSNIDGYPYEMGGTWVHWHQSHVWREITRYKMHNALSPSFNFSRGVNHFQLRTNPTTSTYMTHEAGDELMRSALHKFTNVDGTNGRTVLPFPHDMFYVPEFRKYDEMSYSERIDQIRDELSLNERSSLEAFILLCSGGTLENSSFGEFLHWWAMSGYTYQGCIDCLISYKFKDGQSAFARRFWEEAAGTGRLGYVFGCPVRSVVNERDAVRVTARDGREFAAKRLVCTIPLNVLSSVHFSPPLSPQRMAAANIGHVNQCVKVHAEVSCKDMRSWSGISYPFNKLAYAIGDGTTPAGNTHIVCLGGAHNHIQPEEDVEATKMAVENMSPGNMDIKRLVFHNWCKDEFAKGAWFFAPPQLLSKSLDELRCRHGNVLFANSDWALGWRGFIDGAIEEGTRAAVTVIEELRPAPAVRSHL

SEQ ID NO: 681 - DNA, 1485 bp, synthetic construct
  misc_feature 1..1485: note = Variant of monoamine oxidase
  source 1..1485: mol_type = other DNA
atgaccagccgcgacggctatcagtggaccccggaaacgggtctgacccagggcgtaccgtccctgggtgtcatttcgccgccgactaacatcgaagataccgataaggacgggccttgggatgtcattgtcattgggggcgggtattgtgggctgaccgcaacccgtgatttaaccgtcgcagggttcaagacgctgctgctggaggcccgtgatcgtattggtggccgctcctggagcagtaatattgacggttacccgtatgagatgggtggcacttgggttcattggcatcaaccgcacgtgtggcgtgaaatcacgcgttataaaatgcacaacgcgctgtctccatcatttaacttttcacgtggcgtgaatcacttccaactgcgtaccaatccgaccaccagtacgtacatgacgcacgaagcggaggatgaactgctgcgtagcgcattgcataaattcaccaatgtcgacggcactaatggccgtacagtgttgccgttcccacatgatatgttttatgtgccggaatttcgcaagtatgacgaaatgtcatattccgaacgcattgaccagatccgcgacgatctgtctttgaacgaacgctctagtttagaggctttcattttattatgtagcggtggcaccctggaaaactccagctttggtgaatttctgcattggtgggcaatgtcgggttacacgtatcagggctgtatggattgtttaatctcctataaatttaaggatggccagagtgcgttcgcgcgtcgcttctgggaagaagccgctggcactggccgtctgggctatgtctttggttgcccggtgcgttctgtggtgaacgaacgcgacgcagtacgtgttaccgcacgtgacggtcgcgaattcgcagcgaaacgtttggtttgcacgattccgctgaacgtattgagttctgttcattttagcccaccactgtccccgcaacgcatggccgctgcgaacattggccatgttaaccagtgcgtcaaagtgcatgcggaagtcagtgacaaggatatgcgttcatggtcgggtatctcctatccgttcaacaaattagcctacgctatcggcgatggcacgaccccagcgggtaatacgcatattgtgtgccttgggggggcccataatcatatccagccggaagaggacgtggaagcaacgaagatggccgttgaaaacatgtcgcctgggaatatggatatcaaacgtctggtcttccacaactggtgcaaggatgaatttgccaaaggcgcgtggttcttcgcccctccacagctgctgtcaaagagcctggatgaacgtcgctgtcgtcacggtaatgtcctgtttgcaaactccgattgggccttaggttggcgtggttttatcgatggtgctatcgaggagggcacccgcgcagcggttactgtaattgaggaactgcgtcctgcgcctgcggtgcgttcccacctg

SEQ ID NO: 682 - protein, 495 aa, synthetic construct
  REGION 1..495: note = Variant of monoamine oxidase
MTSRDGYQWTPETGLTQGVPSLGVISPPTNIEDTDKDGPWDVIVIGGGYCGLTATRDLTVAGFKTLLLEARDRIGGRSWSSNIDGYPYEMGGTWVHWHQPHVWREITRYKMHNALSPSFNFSRGVNHFQLRTNPTTSTYMTHEAEDELLRSALHKFTNVDGTNGRTVLPFPHDMFYVPEFRKYDEMSYSERIDQIRDDLSLNERSSLEAFILLCSGGTLENSSFGEFLHWWAMSGYTYQGCMDCLISYKFKDGQSAFARRFWEEAAGTGRLGYVFGCPVRSVVNERDAVRVTARDGREFAAKRLVCTIPLNVLSSVHFSPPLSPQRMAAANIGHVNQCVKVHAEVSDKDMRSWSGISYPFNKLAYAIGDGTTPAGNTHIVCLGGAHNHIQPEEDVEATKMAVENMSPGNMDIKRLVFHNWCKDEFAKGAWFFAPPQLLSKSLDERRCRHGNVLFANSDWALGWRGFIDGAIEEGTRAAVTVIEELRPAPAVRSHL

SEQ ID NO: 683 - DNA, 1485 bp, synthetic construct
  misc_feature 1..1485: note = Variant of monoamine oxidase
  source 1..1485: mol_type = other DNA
atgaccagccgcgacggctatcagtggaccccggaaacgggtctgacccagggcgtaccgtccctgggtgtcatttcgccgccgactaacatcgaagataccgataaggacgggccttgggatgtcattgtcattgggggcgggtattgtgggctgaccgcaacccgtgatttaaccgtcgcagggttcaagacgctgctgctggaggcccgtgatcgtattggtggccgctcctggagcagtaatattgacggttacccgtatgagatgggtggcacttgggttcattggcatcaatcgcacgtgtggcgtgaaatcacgcgttataaaatgcacaacgcgctgtctccatcatttaacttttcacgtggcgtgaatcacttccaactgcgtaccaatccgaccaccagtacgtacatgacgcacgaagcggaggctgaactgctgcgtagcgcattgcataaattcaccaatgtcgacggcactaatggccgtacagtgttgccgttcccacatgatatgttttatgtgccggaatttcgcaagtatgacgaaatgtcatattccgaacgcattgaccagatccgcgacgaactgtctttgaacgaacgctctagtttagaggctttcattttattatgtagcggtggcaccctggaaaactccagctttggtgaatttctgcattggtgggcaatgtcgggttacacgtatcagggctgtattgattgtttaatttcctataaatttaaggatggccagagtgcgttcgcgcgtcgcttctgggaagaagccgctggcactggccgtctgggctatgtctttggttgtccggtgcgttctgtggtgaacgaacgcgacgcagtacgtgttaccgcacgtgacggtcgcgaattcgcagcgaaacgtttggtttgcacgattccgctgaacgtattgagttctgttcattttagcccaccactgtccccgcaacgcatggccgctgcgaacattggccatgttaaccagtgcgtcaaagtgcatgcggaagtcagttgtccggatatgcgttcatggtcgggtatctcctatccgttcaacaaattagcctacgctatcggcgatggcacgaccccagcgggtaatacgcatattgtgtgccttgggggggcccataatcatatccagccggaagaggacgtggaagcaacgaagatggccgttgaaaacatgtcgcctgggaatatggatatcaaacgtctggtcttccacaactggtgcaaggatgaatttgccaaaggcgcgtggttcttcgcccctccacagctgctgtcaaagagcctggatgaactgcgctgtcgtcacggtaatgtcctgtttgcaaactccgattgggccttaggttggcgtggttttatcgatggtgctatcgaggagggcacccgcgcagcggttactgtaattgaggaactgcgtcctgcgcctgcggtgcgttcccacctg

SEQ ID NO: 684 - protein, 495 aa, synthetic construct
  REGION 1..495: note = Variant of monoamine oxidase
MTSRDGYQWTPETGLTQGVPSLGVISPPTNIEDTDKDGPWDVIVIGGGYCGLTATRDLTVAGFKTLLLEARDRIGGRSWSSNIDGYPYEMGGTWVHWHQSHVWREITRYKMHNALSPSFNFSRGVNHFQLRTNPTTSTYMTHEAEAELLRSALHKFTNVDGTNGRTVLPFPHDMFYVPEFRKYDEMSYSERIDQIRDELSLNERSSLEAFILLCSGGTLENSSFGEFLHWWAMSGYTYQGCIDCLISYKFKDGQSAFARRFWEEAAGTGRLGYVFGCPVRSVVNERDAVRVTARDGREFAAKRLVCTIPLNVLSSVHFSPPLSPQRMAAANIGHVNQCVKVHAEVSCPDMRSWSGISYPFNKLAYAIGDGTTPAGNTHIVCLGGAHNHIQPEEDVEATKMAVENMSPGNMDIKRLVFHNWCKDEFAKGAWFFAPPQLLSKSLDELRCRHGNVLFANSDWALGWRGFIDGAIEEGTRAAVTVIEELRPAPAVRSHL

SEQ ID NO: 685 - DNA, 1485 bp, synthetic construct
  misc_feature 1..1485: note = Variant of monoamine oxidase
  source 1..1485: mol_type = other DNA
atgaccagccgcgacggctatcagtggaccccggaaacgggtctgacccagggcgtaccgtccctgggtgtcatttcgccgccgactaacatcgaagataccgataaggacgggccttgggatgtcattgtcattgggggcgggtattgtgggctgaccgcaacccgtgatttaaccgtcgcagggttcaagacgctgctgctggaggcccgtgatcgtattggtggccgctcctggagcagtaatattgacggttacccgtatgagatgggtggcacttgggttcattggcatcaatctcacgtgtggcgtgaaatcacgcgttataaaatgcacaacgcgctgtctccatcatttaacttttcacgtggcgtgaatcacttccaactgcgtaccaatccgaccaccagtacgtacatgacgcacgaagcggaggatgaactgctgcgtagcgcattgcataaattcaccaatgtcgacggcactaatggccgtacagtgttgccgttcccacatgatatgttttatgtgccggaatttcgcaagtatgacgaaatgtcatattccgaacgcattgaccagatccgcgacgaactgtctttgaacgaacgctctagtttagaggctttcattttattatgtagcggtggcaccctggaaaactccagctttggtgaatttctgcattggtgggcaatgtcgggttacacgtatcagggctgtatggattgtttaatctcctataaatttaaggatggccagagtgcgttcgcgcgtcgcttctgggaagaagccgctggcactggccgtctgggctatgtctttggttgtccggtgcgttctgtggtgaacgaacgcgacgcagtacgtgttaccgcacgtgacggtcgcgaattcgcagcgaaacgtttggtttgcacgattccgctgaacgtattgagttctgttcattttagcccaccactgtccccgcaacgcatggccgctgcgaacggcggccatgttaaccagtgcgtcaaagtgcatgcggaagtcagttgtccggatatgcgttcatggtcgggtatctcctatccgttcaacaaattagcctacgctatcggcgatggcacgaccccagcgggtaatacgcatattgtgtgccttgggggggcccataatcatatccagccggaagaggacgtggaagcaacgaagatggccgttgaaaacatgtcgcctgggaatatggatatcaaacgtctggtcttccacaactggtgcaaggatgaatttgccaaaggcgcgtggttcttcgcccctccacagctgctgtcaaagagcctggatgaactgcgctgccgtcacggtaatgtcctgtttgcaaactccgattgggccttaggttggcgtggttttatcgatggtgctatcgaggagggcacccgcgcagcggttactgtaattgaggaactgcgtcctgcgcctgcggtgcgttcccacctg

SEQ ID NO: 686 - protein, 495 aa, synthetic construct; identical to SEQ ID NO: 56
  REGION 1..495: note = Variant of monoamine oxidase

SEQ ID NO: 687 - DNA, 1485 bp, synthetic construct
  misc_feature 1..1485: note = Variant of monoamine oxidase
  source 1..1485: mol_type = other DNA
atgaccagccgcgacggctatcagtggaccccggaaacgggtctgacccagggcgtaccgtccctgggtgtcatttcgccgccgactaacatcgaagataccgataaggacgggccttgggatgtcattgtcattgggggcgggtattgtgggctgaccgcaacccgtgatttaaccgtcgcagggttcaagacgctgctgctggaggcccgtgatcgtattggtggccgctcctggagcagtaatattgacggttacccgtatgagatgggtggcacttgggttcattggcatcaatctcacgtgtggcgtgaaatcacgcgttataaaatgcacaacgcgctgtctccatcatttaacttttcacgtggcgtgaatcacttccaactgcgtaccaatccgaccaccagtacgtacatgacgcacgaagcggaggatgaactgctgcgtagcgcattgcataaattcaccaatgtcgacggcactaatggccgtacagtgttgccgttcccacatgatatgttttatgtgccggaatttcgcaagtatgacgaaatgtcatattccgaacgcattgaccagatccgcgacgaactgtctttgaacgaacgctctagtttagaggctttcattttattatgtagcggtggcaccctggaaaactccagctttggtgaatttctgcattggtgggcaatgtcgggttacacgtatcagggctgtatggattgtttaatctcctataaatttaaggatggccagagtgcgttcgcgcgtcgcttctgggaagaagccgctggcactggccgtctgggctatgtctttggttgtccggtgcgttctgtggtgaacgaacgcgacgcagtacgtgttaccgcacgtgacggtcgcgaattcgcagcgaaacgtttggtttgcacgattccgctgaacgtattgagttctgttcattttagcccaccactgtccccgcaacgcatggccgctgcgaacattggccatgttaaccagtgcgtcaaagtgcatgcggaagtcagttgtccggatatgcgttcatggtcgggtatctcctatccgttcaacaaattagcctacgctatcggcgatggcacgaccccagcgggtaatacgcatattgtgtgccttgggggggcccataatcatatccagccggaagaggacgtggaagcaacgaagatggccgttgaaaacatgtcgcctgggaatatggatatcaaacgtctggtcttcgggaactggtgcaaggatgaatttgccaaaggcgcgtggttcttcgcccctccacagctgctgtcaaagagcctggatgaactgcgctgccgtcacggtaatgtcctgtttgcaaactccgattgggccttaggttggcgtggttttatcgatggtgctatcgaggagggcacccgcgcagcggttactgtaattgaggaactgcgtcctgcgcctgcggtgcgttcccacctg

SEQ ID NO: 688 - protein, 495 aa, synthetic construct; identical to SEQ ID NO: 72
  REGION 1..495: note = Variant of monoamine oxidase

SEQ ID NO: 689 - DNA, 1485 bp, synthetic construct
  misc_feature 1..1485: note = Variant of monoamine oxidase
  source 1..1485: mol_type = other DNA
atgaccagccgcgacggctatcagtggaccccggaaacgggtctgacccagggcgtaccgtccctgggtgtcatttcgccgccgactaacatcgaagataccgataaggacgggccttgggatgtcattgtcattgggggcgggtattgtgggctgaccgcaacccgtgatttaaccgtcgcagggttcaagacgctgctgctggaggcccgtgatcgtattggtggccgctcctggagcagtaatattgacggttacccgtatgagatgggtggcacttgggttcattggcatcaaccgcacgtgtggcgtgaaatcacgcgttataaaatgcacaacgcgctgtctccatcatttaacttttcacgtggcgtgaatcacttccaactgcgtaccaatccgaccaccagtacgtacatgacgcacgaagcggaggctgaactgctgcgtagcgcattgcataaattcaccaatgtcgacggcactaatggccgtacagtgttgccgttcccacatgatatgttttatgtgccggaatttcgcaagtatgacgaaatgtcatattccgaacgcattgaccagatccgcgacgaactgtctttgaacgaacgctctagtttagaggctttcattttattatgtagcggtggcaccctggaaaactccagctttggtgaatttctgcattggtgggcaatgtcgggttacacgtatcagggctgtattgattgtttaatttcctataaatttaaggatggccagagtgcgttcgcgcgtcgcttctgggaagaagccgctggcactggccgtctgggctatgtctttggtactccggtgcgttctgtggtgaacgaacgcgacgcagtacgtgttaccgcacgtgacggtcgcgaattcgcagcgaaacgtttggtttgcacgattccgctgaacgtattgagttctgttcattttagcccaccactgtccccgcaacgcatggccgctgcgaacattggccatgttaaccagtgcgtcaaagtgcatgcggaagtcagttgcccagatatgcgttcatggtcgggtatctcctatccgttcaacaaattagcctacgctatcggcgatggcacgaccccagcgggtaatacgcatattgtgtgccttgggggggcccataatcatatccagccggaagaggacgtggaagcaacgaagatggccgttgaaaacatgtcgcctgggaatatggatatcaaacgtctggtcttccacaactggtgcaaggatgaatttgccaaaggcgcgtggttcttcgcccctccacagctgctgtcaaagagcctggatgaactgcgcgcacgtcacggtaatgtcctgtttgcaaactccgattgggccttaggttggcgtggttttatcgatggtgctatcgaggagggcacccgcgcagcggttactgtaattgaggaactgcgtcctgcgcctgcggtgcgttcccacctg

SEQ ID NO: 690 - protein, 495 aa, synthetic construct
  REGION 1..495: note = Variant of monoamine oxidase
MTSRDGYQWTPETGLTQGVPSLGVISPPTNIEDTDKDGPWDVIVIGGGYCGLTATRDLTVAGFKTLLLEARDRIGGRSWSSNIDGYPYEMGGTWVHWHQPHVWREITRYKMHNALSPSFNFSRGVNHFQLRTNPTTSTYMTHEAEAELLRSALHKFTNVDGTNGRTVLPFPHDMFYVPEFRKYDEMSYSERIDQIRDELSLNERSSLEAFILLCSGGTLENSSFGEFLHWWAMSGYTYQGCIDCLISYKFKDGQSAFARRFWEEAAGTGRLGYVFGTPVRSVVNERDAVRVTARDGREFAAKRLVCTIPLNVLSSVHFSPPLSPQRMAAANIGHVNQCVKVHAEVSCPDMRSWSGISYPFNKLAYAIGDGTTPAGNTHIVCLGGAHNHIQPEEDVEATKMAVENMSPGNMDIKRLVFHNWCKDEFAKGAWFFAPPQLLSKSLDELRARHGNVLFANSDWALGWRGFIDGAIEEGTRAAVTVIEELRPAPAVRSHL

SEQ ID NO: 691 - DNA, 1485 bp, synthetic construct
  misc_feature 1..1485: note = Variant of monoamine oxidase
  source 1..1485: mol_type = other DNA
atgaccagccgcgacggctatcagtggaccccggaaacgggtctgacccagggcgtaccgtccctgggtgtcatttcgccgccgactaacatcgaagataccgataaggacgggccttgggatgtcattgtcattgggggcgggtattgtgggctgaccgcaacccgtgatttaaccgtcgcagggttcaagacgctgctgctggaggcccgtgatcgtattggtggccgctcctggagcagtaatattgacggttacccgtatgagatgggtggcacttgggttcattggcatcaatctcacgtgtggcgtgaaatcacgcgttataaaatgcacaacgcgctgtctccatcatttaacttttcacgtggcgtgaatcacttccaactgcgtaccaatccgaccaccagtacgtacatgacgcacgaagcggaggatgaactgctgcgtagcgcattgcataaattcaccaatgtcgacggcactaatggccgtacagtgttgccgttcccacatgatatgttttatgtgccggaatttcgcaagtatgacgaaatgtcatattccgaacgcattgaccagatccgcgacgatctgtctttgaacgaacgctctagtttagaggctttcattttattatgtagcggtggcaccctggaaaactccagctttggtgaatttctgcattggtgggcaatgtcgggttacacgtatcagggctgtatggattgtttaatttcctataaagttaaggatggccagagtgcgttcgcgcgtcgcttctgggaagaagccgctggcactggccgtctgggctatgtctttggttgtccggtgcgttctgtggtgaacgaacgcgacgcagtacgtgttaccgcacgtgacggtcgcgaattcgcagcgaaacgtttggtttgcacgattccgctgaacgtattgagttctgttcattttagcccaccactgtccccgcaacgcatggccgctgcgaacattggccatgttaaccagtgcgtcaaagtgcatgcggaagtcagttgcccagatatgcgttcatggtcgggtatctcctatccgttcaacaaattagcctacgctatcggcgatggcacgaccccagcgggtaatacgcatattgtgtgccttgggggggcccataatcatatccagccggaagaggacgtggaagcaacgaagatggccgttgaaaacatgtcgcctgggaatatggatatcaaacgtctggtcttccacaactggtgcaaggatgaatttgccaaaggcgcgtggttcttcgcccctccacagctgctgtcaaagagcctggatgaactgcgctgtcgtcacggtaatgtcctgtttgcaaactccgattgggccttaggttggcgtggttttatcgatggtgctatcgaggagggcacccgcgcagcggttactgtaattgaggaactgcgtcctgcgcctgcggtgcgttcccacctg

SEQ ID NO: 692 - protein, 495 aa, synthetic construct
  REGION 1..495: note = Variant of monoamine oxidase
MTSRDGYQWTPETGLTQGVPSLGVISPPTNIEDTDKDGPWDVIVIGGGYCGLTATRDLTVAGFKTLLLEARDRIGGRSWSSNIDGYPYEMGGTWVHWHQSHVWREITRYKMHNALSPSFNFSRGVNHFQLRTNPTTSTYMTHEAEDELLRSALHKFTNVDGTNGRTVLPFPHDMFYVPEFRKYDEMSYSERIDQIRDDLSLNERSSLEAFILLCSGGTLENSSFGEFLHWWAMSGYTYQGCMDCLISYKVKDGQSAFARRFWEEAAGTGRLGYVFGCPVRSVVNERDAVRVTARDGREFAAKRLVCTIPLNVLSSVHFSPPLSPQRMAAANIGHVNQCVKVHAEVSCPDMRSWSGISYPFNKLAYAIGDGTTPAGNTHIVCLGGAHNHIQPEEDVEATKMAVENMSPGNMDIKRLVFHNWCKDEFAKGAWFFAPPQLLSKSLDELRCRHGNVLFANSDWALGWRGFIDGAIEEGTRAAVTVIEELRPAPAVRSHL

SEQ ID NO: 693 - DNA, 1485 bp, synthetic construct
  misc_feature 1..1485: note = Variant of monoamine oxidase
  source 1..1485: mol_type = other DNA
atgaccagccgcgacggctatcagtggaccccggaaacgggtctgacccagggcgtaccgtccctgggtgtcatttcgccgccgactaacatcgaagataccgataaggacgggccttgggatgtcattgtcattgggggcgggtattgtgggctgaccgcaacccgtgatttaaccgtcgcagggttcaagacgctgctgctggaggcccgtgatcgtattggtggccgctcctggagcagtaatattgacggttacccgtatgagatgggtggcacttgggttcattggcatcaatctcacgtgtggcgtgaaatcacgcgttataaaatgcacggcgcgctgtctccgtcatttaacttttcacgtggcgtgaatcacttccaactgcgtaccaatccgaccaccagtacgtacatgacgcacgaagcggaggatgaactgctgcgtagcgcattgcataaattcaccaatgtcgacggcactaatggccgtacagtgttgccgttcccacatgatatgttttatgtgccggaatttcgcaagtatgacgaaatgtcatattccgaacgcattgaccagatccgcgacgaactgtctttgaacgaacgctctagtttagaggctttcattttattatgtagcggtggcaccctggaaaactccagctttggtgaatttctgcattggtgggcaatgtcgggttacacgtatcagggctgtatggattgtttaatctcctataaatttaaggatggccagagtgcgttcgcgcgtcgcttctgggaagaagccgctggcactggccgtctgggctatgtctttggttgtccggtgcgttctgtggtgaacgaacgcgacgcagtacgtgttaccgcacgtgacggtcgcgaattcgcagcgaaacgtttggtttgcacgattccgctgaacgtattgagttctgttcattttagcccaccactgtccccgcaacgcatggccgctgcgaacattggccatgttaaccagggcgtcaaagtgcatgcggaagtcagttgtccggatatgcgttcatggtcgggtatctcctatccgttcaacaaattagcctacgctatcggcgatggcacgaccccagcgggtaatacgcatattgtgtgccttgggggggcccataatcatatccagccggaagaggacgtggaagcaacgaagatggccgttgaaaacatgtcgcctgggaatatggatatcaaacgtctggtcttccacaactggtgcaaggatgaatttgccaaaggcgcgtggttcttcgcccctccacagctgctgtcaaagagcctggatgaactgcgctgccgtcacggtaatgtcctgtttgcaaactccgattgggccttaggttggcgtggttttatcgatggtgctatcgaggagggcacccgcgcagcggttactgtaattgaggaactgcgtcctgcgcctgcggtgcgttcccacctg

SEQ ID NO: 694 - protein, 495 aa, synthetic construct
  REGION 1..495: note = Variant of monoamine oxidase
MTSRDGYQWTPETGLTQGVPSLGVISPPTNIEDTDKDGPWDVIVIGGGYCGLTATRDLTVAGFKTLLLEARDRIGGRSWSSNIDGYPYEMGGTWVHWHQSHVWREITRYKMHGALSPSFNFSRGVNHFQLRTNPTTSTYMTHEAEDELLRSALHKFTNVDGTNGRTVLPFPHDMFYVPEFRKYDEMSYSERIDQIRDELSLNERSSLEAFILLCSGGTLENSSFGEFLHWWAMSGYTYQGCMDCLISYKFKDGQSAFARRFWEEAAGTGRLGYVFGCPVRSVVNERDAVRVTARDGREFAAKRLVCTIPLNVLSSVHFSPPLSPQRMAAANIGHVNQGVKVHAEVSCPDMRSWSGISYPFNKLAYAIGDGTTPAGNTHIVCLGGAHNHIQPEEDVEATKMAVENMSPGNMDIKRLVFHNWCKDEFAKGAWFFAPPQLLSKSLDELRCRHGNVLFANSDWALGWRGFIDGAIEEGTRAAVTVIEELRPAPAVRSHL

SEQ ID NO: 695 - DNA, 1485 bp, synthetic construct
  misc_feature 1..1485: note = Variant of monoamine oxidase
  source 1..1485: mol_type = other DNA
atgaccagccgcgacggctatcagtggaccccggaaacgggtctgacccagggcgtaccgtccctgggtgtcatttcgccgccgactaacatcgaagataccgataaggacgggccttgggatgtcattgtcattgggggcgggtattgtgggctgaccgcaacccgtgatttaaccgtcgcagggttcaagacgctgctgctggaggcccgtgatcgtattggtggccgctcctggagcagtaatattgacggttacccgtatgagatgggtggcacttgggttcattggcatcaatcgcacgtgtggcgtgaaatcacgcgttataaaatgcacaacgcgctgtctccatcatttaacttttcacgtggcgtgaatcacttccaactgcgtaccaatccgaccaccagtacgtacatgacgcacgaagcgtcggctgaactgctgcgtagcgcattgcataaattcaccaatgtcgacggcactaatggccgtacagtgttgccgttcccacatgatatgttttatgtgccggaatttcgcaagtatgacgaaatgtcatattccgaacgcattgaccagatccgcgacgatctgtctttgaacgaacgctctagtttagaggctttcattttattatgtagcggtggcaccctggaaaactccagctttggtgaatttctgcattggtgggcaatgtcgggttacacgtatcagggctgtatggattgtttaatttcctataaatttaaggatggccagagtgcgttcgcgcgtcgcttctgggaagaagccgctggcactggccgtctgggctatgtctttggttgtccggtgcgttctgtggtgaacgaacgcgacgcagtacgtgttaccgcacgtgacggtcgcgaattcgcagcgaaacgtttggtttgcacgattccgctgaacgtattgagttctgttcattttagcccaccactgtccccgcaacgcatggccgctgcgaacattggccatgttaaccagtgcgtcaaagtgcatgcggaagtcagttgcccagatatgcgttcatggtcgggtatctcctatccgttcaacaaattagcctacgctatcggcgatggcacgaccccagcgggtaatacgcatattgtgtgccttgggggggcccataatcatatccagccggaagaggacgtggaagcaacgaagatggccgttgaaaacatgtcgcctgggaatatggatatcaaacgtctggtcttccacaactggtgcaaggatgaatttgccaaaggcgcgtggttcttcgcccctccacagctgctgtcaaagagcctggatgaacgtcgcgcacgtcacggtaatgtcctgtttgcaaactccgattgggccttaggttggcgtggttttatcgatggtgctatcgaggagggcacccgcgcagcggttactgtaattgaggaactgcgtcctgcgcctgcggtgcgttcccacctg

SEQ ID NO: 696 - protein, 495 aa, synthetic construct
  REGION 1..495: note = Variant of monoamine oxidase
MTSRDGYQWTPETGLTQGVPSLGVISPPTNIEDTDKDGPWDVIVIGGGYCGLTATRDLTVAGFKTLLLEARDRIGGRSWSSNIDGYPYEMGGTWVHWHQSHVWREITRYKMHNALSPSFNFSRGVNHFQLRTNPTTSTYMTHEASAELLRSALHKFTNVDGTNGRTVLPFPHDMFYVPEFRKYDEMSYSERIDQIRDDLSLNERSSLEAFILLCSGGTLENSSFGEFLHWWAMSGYTYQGCMDCLISYKFKDGQSAFARRFWEEAAGTGRLGYVFGCPVRSVVNERDAVRVTARDGREFAAKRLVCTIPLNVLSSVHFSPPLSPQRMAAANIGHVNQCVKVHAEVSCPDMRSWSGISYPFNKLAYAIGDGTTPAGNTHIVCLGGAHNHIQPEEDVEATKMAVENMSPGNMDIKRLVFHNWCKDEFAKGAWFFAPPQLLSKSLDERRARHGNVLFANSDWALGWRGFIDGAIEEGTRAAVTVIEELRPAPAVRSHL

SEQ ID NO: 697 - DNA, 1485 bp, synthetic construct
  misc_feature 1..1485: note = Variant of monoamine oxidase
  source 1..1485: mol_type = other DNA
atgaccagccgcgacggctatcagtggaccccggaaacgggtctgacccagggcgtaccgtccctgggtgtcatttcgccgccgactaacatcgaagataccgataaggacgggccttgggatgtcattgtcattgggggcgggtattgtgggctgaccgcaacccgtgatttaaccgtcgcagggttcaagacgctgctgctggaggcccgtgatcgtattggtggccgctcctggagcagtaatattgacggttacccgtatgagatgggtggcggctgggttcattggcatcaatctcacgtgtggcgtgaaatcacgcgttataaaatgcacaacgcgctgtctccatcatttaacttttcacgtggcgtgaatcacttccaactgcgtaccaatccgaccaccagtacgtacatgacgcacgaagcggaggatgaactgctgcgtagcgcattgcataaattcaccaatgtcgacggcactaatggccgtacagtgttgccgttcccacatgatatgttttatgtgccggaatttcgcaagtatgatgaaatgtcatattccgaacgcattgaccagatccgcgacgaactgtctttgaacgaacgctctagtttagaggctttcattttattatgtagcggtggcaccctggaaaactccagctttggtgaatttctgcattggtgggcaatgtcgggttacacgcgtcagggctgtatggattgtttaatctcctataaatttaaggatggccagagtgcgttcgcgcgtcgcttctgggaagaagccgctggcactggccgtctgggctatgtctttggttgtccggtgcgttctgtggtgaatgaacgcgacgcagtacgtgttaccgcacgtgacggtcgcgaattcgcagcgaaacgtttggtttgcacgattccgctgaacgtattgagttctgttcattttagcccaccactgtccccgcaacgcatggccgctgcgaacatcggccatgttaaccagtgcgtcaaagtgcatgcggaagtcagttgtccggatatgcgttcatggtcgggtatctcctatccgttcaacaaattagcctacgctatcggcgatggcacgaccccagcgggtaatacgcatattgtgtgccttgggggggccgagaatcatatccagccggaagaggacgtggaagcaacgaagatggccgttgaaaacatgtcgcctgggaatatggatatcaaacgtctggtcttccacaactggtgcaaggatgaatttgccaaaggcgggtggttcttcgcccctccacagctgctgtcaaagagcctggatgaactgcgctgccgtcacggtaatgtcctgtttgcaaactccgattgggccttaggttggcgtggttttatcgatggtgctatcgaggagggcacccgcgcagcggttactgtaattgaggaactgcgtcctgcgcctgcggtgcgttcccacctg

SEQ ID NO: 698 - protein, 495 aa, synthetic construct
  REGION 1..495: note = Variant of monoamine oxidase
MTSRDGYQWTPETGLTQGVPSLGVISPPTNIEDTDKDGPWDVIVIGGGYCGLTATRDLTVAGFKTLLLEARDRIGGRSWSSNIDGYPYEMGGGWVHWHQSHVWREITRYKMHNALSPSFNFSRGVNHFQLRTNPTTSTYMTHEAEDELLRSALHKFTNVDGTNGRTVLPFPHDMFYVPEFRKYDEMSYSERIDQIRDELSLNERSSLEAFILLCSGGTLENSSFGEFLHWWAMSGYTRQGCMDCLISYKFKDGQSAFARRFWEEAAGTGRLGYVFGCPVRSVVNERDAVRVTARDGREFAAKRLVCTIPLNVLSSVHFSPPLSPQRMAAANIGHVNQCVKVHAEVSCPDMRSWSGISYPFNKLAYAIGDGTTPAGNTHIVCLGGAENHIQPEEDVEATKMAVENMSPGNMDIKRLVFHNWCKDEFAKGGWFFAPPQLLSKSLDELRCRHGNVLFANSDWALGWRGFIDGAIEEGTRAAVTVIEELRPAPAVRSHL

SEQ ID NO: 699 - DNA, 1485 bp, synthetic construct
  misc_feature 1..1485: note = Variant of monoamine oxidase
  source 1..1485: mol_type = other DNA
atgaccagccgcgacggctatcagtggaccccggaaacgggtctgacccagggcgtaccgtccctgggtgtcatttcgccgccgactaacatcgaagataccgataaggacgggccttgggatgtcattgtcattgggggcgggtattgtgggctgaccgcaacccgtgatttaaccgtcgcagggttcaagacgctgctgctggaggcccgtgatcgtattggtggccgctcctggagcagtaatattgacggttacccgtatgagatgggtggcacttgggttcattggcatcaatcgcacgtgtggcgtgaaatcacgcgttataaaatgcacaacgcgctgtctccatcatttaacttttcacgtggcgtgaatcacttccaactgcgtaccaatccgaccaccagtacgtacatgacgcacgaagcgggggatgaactgatgcgtagcgcattgcataaattcaccaatgtcgacggcactaatggccgtacagtgttgccgttcccacatgatatgttttatgtgccggaatttcgcaagtatgacgaaatgtcatattccgaacgcattgaccagatccgcgacgaactgtctttgaacgaacgctctagtttagaggctttcattttattatgtagcggtggcaccctggaaaactccagctttggtgaatttctgcattggtgggcaatgtcgggttacacgtatcagggctgtatggattgtttaatgtcctataaatttaaggatggccagagtgcgttcgcgcgtcgcttctgggaagaagccgctggcactggccgtctgggctatgtctttggttgtccggtgcgttctgtggtgaacgaacgcgacgcagtacgtgttaccgcacgtgacggtcgcgaattcgcagcgaaacgtttggtttgcacgattccgctgaacgtattgagttctgttcattttagcccaccactgtccccgcaacgcatggccgctgcgaacattggccatgttaaccagtgcgtcaaagtgcatgcggaagtcagttgtccggatatgcgttcatggtcgggtatctcctatccgttcaacaaattagcctacgctatcggcgatggcacgaccccagcgggtaatacgcatattgtgtgccttgggggggcccataatcatatccagccggaagaggacgtggaagcaacgaagatggccgttgaaaacatgtcgcctgggaatatggatatcaaacgtctggtcttccacaactggtgcaaggatgaatttgccaaaggcgcgtggttcttcgcccctccacagctgctgtcaaagagcctggatgaactgcgctgccgtcacggtaatgtcctgtttgcaaactccgattgggccttaggttggcgtggttttatcgatggtgctatcgaggagggcacccgcgcagcggttactgtaattgaggaactgcgtcctgcgcctgcggtgcgttcccacctg

SEQ ID NO: 700 - protein, 495 aa, synthetic construct
  REGION 1..495: note = Variant of monoamine oxidase
MTSRDGYQWTPETGLTQGVPSLGVISPPTNIEDTDKDGPWDVIVIGGGYCGLTATRDLTVAGFKTLLLEARDRIGGRSWSSNIDGYPYEMGGTWVHWHQSHVWREITRYKMHNALSPSFNFSRGVNHFQLRTNPTTSTYMTHEAGDELMRSALHKFTNVDGTNGRTVLPFPHDMFYVPEFRKYDEMSYSERIDQIRDELSLNERSSLEAFILLCSGGTLENSSFGEFLHWWAMSGYTYQGCMDCLMSYKFKDGQSAFARRFWEEAAGTGRLGYVFGCPVRSVVNERDAVRVTARDGREFAAKRLVCTIPLNVLSSVHFSPPLSPQRMAAANIGHVNQCVKVHAEVSCPDMRSWSGISYPFNKLAYAIGDGTTPAGNTHIVCLGGAHNHIQPEEDVEATKMAVENMSPGNMDIKRLVFHNWCKDEFAKGAWFFAPPQLLSKSLDELRCRHGNVLFANSDWALGWRGFIDGAIEEGTRAAVTVIEELRPAPAVRSHL

SEQ ID NO: 701 - DNA, 1485 bp, synthetic construct
  misc_feature 1..1485: note = Variant of monoamine oxidase
  source 1..1485: mol_type = other DNA
atgaccagccgcgacggctatcagtggaccccggaaacgggtctgacccagggcgtaccgtccctgggtgtcatttcgccgccgactaacatcgaagataccgataaggacgggccttgggatgtcattgtcattgggggcgggtattgtgggctgaccgcaacccgtgatttaaccgtcgcagggttcaagacgctgctgctggaggcccgtgatcgtattggtggccgctcctggagcagtaatattgacggttacccgtatgagatgggtggcacttgggttcattggcatcaaccgcacgtgtggcgtgaaatcacgcgttataaaatgcacaacgcgctgtctccatcatttaacttttcacgtggcgtgaatcacttccaactgcgtaccaatccgaccaccagtacgtacatgacgcacgaagcggaggatgaactgctgcgtagcgcattgcataaattcaccaatgtcgacggcactaatggccgtacagtgttgccgttcccacatgatatgttttatgtgccggaatttcgcaagtatgacgaaatgtcatattccgaacgcattgaccagatccgcgacgatctgtctttgaacgaacgctctagtttagaggctttcattttattatgtagcggtggcaccctggaaaactccagctttggtgaatttctgcattggtgggcaatgtcgggttacacgtatcagggctgtatggattgtttaatctcctataaatttaaggatggccagagtgcgttcgcgcgtcgcttctgggaagaagccgctggcactggccgtctgggctatgtctttggttgcccggtgcgttctgtggtgaacgaacgcgacgcagtacgtgttaccgcacgtgacggtcgcgaattcgcagcgaaacgtttggtttgcacgattccgctgaacgtattgagttctgttcattttagcccaccactgtccccgcaacgcatggccgctgcgaacattggccatgttaaccagtgcgtcaaagtgcatgcggaagtcagttgtccggatatgcgttcatggtcgggtatctcctatccgttcaacaaattagcctacgctatcggcgatggcacgaccccagcgggtaatacgcatattgtgtgccttgggggggcccataatcatatccagccggaagaggacgtggaagcaacgaagatggccgttgaaaacatgtcgcctgggaatatggatatcaaacgtctggtcttccacaactggtgcaaggatgaatttgccaaaggcgcgtggttcttcgcccctccacagctgctgtcaaagagcctggatgaactgcgcgcacgtcacggtaatgtcctgtttgcaaactccgattgggccttaggttggcgtggttttatcgatggtgctatcgaggagggcacccgcgcagcggttactgtaattgaggaactgcgtcctgcgcctgcggtgcgttcccacctg

SEQ ID NO: 702 - protein, 495 aa, synthetic construct
  REGION 1..495: note = Variant of monoamine oxidase
MTSRDGYQWTPETGLTQGVPSLGVISPPTNIEDTDKDGPWDVIVIGGGYCGLTATRDLTVAGFKTLLLEARDRIGGRSWSSNIDGYPYEMGGTWVHWHQPHVWREITRYKMHNALSPSFNFSRGVNHFQLRTNPTTSTYMTHEAEDELLRSALHKFTNVDGTNGRTVLPFPHDMFYVPEFRKYDEMSYSERIDQIRDDLSLNERSSLEAFILLCSGGTLENSSFGEFLHWWAMSGYTYQGCMDCLISYKFKDGQSAFARRFWEEAAGTGRLGYVFGCPVRSVVNERDAVRVTARDGREFAAKRLVCTIPLNVLSSVHFSPPLSPQRMAAANIGHVNQCVKVHAEVSCPDMRSWSGISYPFNKLAYAIGDGTTPAGNTHIVCLGGAHNHIQPEEDVEATKMAVENMSPGNMDIKRLVFHNWCKDEFAKGAWFFAPPQLLSKSLDELRARHGNVLFANSDWALGWRGFIDGAIEEGTRAAVTVIEELRPAPAVRSHL

SEQ ID NO: 703 - DNA, 1485 bp, synthetic construct
  misc_feature 1..1485: note = Variant of monoamine oxidase
  source 1..1485: mol_type = other DNA
atgaccagccgcgacggctatcagtggaccccggaaacgggtctgacccagggcgtaccgtccctgggtgtcatttcgccgccgactaacatcgaagataccgataaggacgggccttgggatgtcattgtcattgggggcgggtattgtgggctgaccgcaacccgtgatttaaccgtcgcagggttcaagacgctgctgctggaggcccgtgatcgtattggtggccgctcctggagcagtcgcattgacggttacccgtatgagatgggtggcacttgggttcattggcatcaatctcacgtgtggcgtgaaatcacgcgttataaaatgcacggcgcgctgtctccgtcatttaacttttcacgtggcgtgaatcacttccaactgcgtaccaatccgaccaccagtacgtacatgacgcacgaagcggaggatgaactgctgcgtagcgcattgcataaattcaccaatgtcgacggcactaatggccgtacagtgttgccgttcccacatgatatgttttatgtgccggaatttcgcaagtatgacgaaatgtcatattccgaacgcattgaccagatccgcgacgaactgtctttgaacgaacgctctagtttagaggctttcattttattatgtagcggtggcggcctggaaaactccagctttggtgaatttctgcattggtgggcaatgtcgggttacacgtatcagggctgtatggattgtttaatctcctataaatttaaggatggccagagtgcgttcgcgcgtcgcttctgggaagaagccgctggcactggccgtctgggctatgtctttggttgtccggtgcgttctgtggtgaacgaacgcgacgcagtacgtgttaccgcacgtgacggtcgcgaattcgcagcgaaacgtttggtttgcacgattccgctgaacgtattgagttctgttcattttagcccaccactgtccccgcaacgcatggccgctgcgaacattggccatgttaaccaggctgtcaaagtgcatgcggaagtcagttgtccggatatgcgttcatggtcgggtatctcctatccgttcaacaaattagcctacgctatcggcgatggcacgaccccagcgggtaatacgcatattgtgtgccttgggggggcccataatcatatccagccggaagaggacgtggaagcaacgaagatggccgttgaaaacatgtcgcctgggaatatggatatcaaacgtctggtcttccacaactggtgcaaggatgaatttgccaaaggcgcgtggttcttcgcccctccacagctgctgtcaaagagcctggatgaactgcgctgccgtcacggtaatgtcctgtttgcaaactccgattgggccttaggttggcgtggttttatcgatggtgctatcgaggagggcacccgcgcagcggttactgtaattgaggaactgcgtcctgcgcctgcggtgcgttcccacctg

SEQ ID NO: 704 - protein, 495 aa, synthetic construct
  REGION 1..495: note = Variant of monoamine oxidase
MTSRDGYQWTPETGLTQGVPSLGVISPPTNIEDTDKDGPWDVIVIGGGYCGLTATRDLTVAGFKTLLLEARDRIGGRSWSSRIDGYPYEMGGTWVHWHQSHVWREITRYKMHGALSPSFNFSRGVNHFQLRTNPTTSTYMTHEAEDELLRSALHKFTNVDGTNGRTVLPFPHDMFYVPEFRKYDEMSYSERIDQIRDELSLNERSSLEAFILLCSGGGLENSSFGEFLHWWAMSGYTYQGCMDCLISYKFKDGQSAFARRFWEEAAGTGRLGYVFGCPVRSVVNERDAVRVTARDGREFAAKRLVCTIPLNVLSSVHFSPPLSPQRMAAANIGHVNQAVKVHAEVSCPDMRSWSGISYPFNKLAYAIGDGTTPAGNTHIVCLGGAHNHIQPEEDVEATKMAVENMSPGNMDIKRLVFHNWCKDEFAKGAWFFAPPQLLSKSLDELRCRHGNVLFANSDWALGWRGFIDGAIEEGTRAAVTVIEELRPAPAVRSHL

SEQ ID NO: 705 - DNA, 1485 bp, synthetic construct
  misc_feature 1..1485: note = Variant of monoamine oxidase
  source 1..1485: mol_type = other DNA
atgaccagccgcgacggctatcagtggaccccggaaacgggtctgacccagggcgtaccgtccctgggtgtcatttcgccgccgactaacatcgaagataccgataaggacgggccttgggatgtcattgtcattgggggcgggtattgtgggctgaccgcaacccgtgatttaaccgtcgcagggttcaagacgctgctgctggaggcccgtgatcgtattggtggccgctcctggagcagtaatattgacggttacccgtatgagatgggtggcacttgggttcattggcatcaatcgcacgtgtggcgtgaaatcacgcgttataaaatgcacaacgcgctgtctccatcatttaacttttcacgtggcgtgaatcacttccaactgcgtaccaatccgaccaccagtacgtacatgacgcacgaagcggaggctgaactgctgcgtagcgcattgcataaattcaccaatgtcgacggcactaatggccgtacagtgttgccgttcccacatgatatgttttatgtgccggaatttcgcaagtatgacgaaatgtcatattccgaacgcattgaccagatccgcgacgaactgtctttgaacgaacgctctagtttagaggctttcattttattatgtagcggtggcaccctggaaaactccagctttggtgaatttctgcattggtgggcaatgtcgggttacacgtatcagggctgtatggattgtttaatttcctataaatttaaggatggccagagtgcgttcgcgcgtcgcttctgggaagaagccgctggcactggccgtctgggctatgtctttggtactccggtgcgttctgtggtgaacgaacgcgacgcagtacgtgttaccgcacgtgacggtcgcgaattcgcagcgaaacgtttggtttgcacgattccgctgaacgtattgagttctgttcattttagcccaccactgtccccgcaacgcatggccgctgcgaacattggccatgttaaccagtgcgtcaaagtgcatgcggaagtcagttgcccagatatgcgttcatggtcgggtatctcctatccgttcaacaaattagcctacgctatcggcgatggcacgaccccagcgggtaatacgcatattgtgtgccttgggggggcccataatcatatccagccggaagaggacgtggaagcaacgaagatggccgttgaaaacatgtcgcctgggaatatggatatcaaacgtctggtcttccacaactggtgcaaggatgaatttgccaaaggcgcgtggttcttcgcccctccacagctgctgtcaaagagcctggatgaactgcgctgtcgtcacggtaatgtcctgtttgcaaactccgattgggccttaggttggcgtggttttatcgatggtgctatcgaggagggcacccgcgcagcggttactgtaattgaggaactgcgtcctgcgcctgcggtgcgttcccacctg

SEQ ID NO: 706 - protein, 495 aa, synthetic construct
  REGION 1..495: note = Variant of monoamine oxidase
MTSRDGYQWTPETGLTQGVPSLGVISPPTNIEDTDKDGPWDVIVIGGGYCGLTATRDLTVAGFKTLLLEARDRIGGRSWSSNIDGYPYEMGGTWVHWHQSHVWREITRYKMHNALSPSFNFSRGVNHFQLRTNPTTSTYMTHEAEAELLRSALHKFTNVDGTNGRTVLPFPHDMFYVPEFRKYDEMSYSERIDQIRDELSLNERSSLEAFILLCSGGTLENSSFGEFLHWWAMSGYTYQGCMDCLISYKFKDGQSAFARRFWEEAAGTGRLGYVFGTPVRSVVNERDAVRVTARDGREFAAKRLVCTIPLNVLSSVHFSPPLSPQRMAAANIGHVNQCVKVHAEVSCPDMRSWSGISYPFNKLAYAIGDGTTPAGNTHIVCLGGAHNHIQPEEDVEATKMAVENMSPGNMDIKRLVFHNWCKDEFAKGAWFFAPPQLLSKSLDELRCRHGNVLFANSDWALGWRGFIDGAIEEGTRAAVTVIEELRPAPAVRSHL

SEQ ID NO: 707 - DNA, 1485 bp, synthetic construct
  misc_feature 1..1485: note = Variant of monoamine oxidase
  source 1..1485: mol_type = other DNA
atgaccagccgcgacggctatcagtggaccccggaaacgggtctgacccagggcgtaccgtccctgggtgtcatttcgccgccgactaacatcgaagataccgataaggacgggccttgggatgtcattgtcattgggggcgggtattgtgggctgaccgcaacccgtgatttaaccgtcgcagggttcaagacgctgctgctggaggcccgtgatcgtattggtggccgctcctggagcagtaatattgacggttacccgtatgagatgggtggcacttgggttcattggcatcaaccgcacgtgtggcgtgaaatcacgcgttataaaatgcacaacgcgctgtctccatcatttaacttttcacgtggcgtgaatcacttccaactgcgtaccaatccgaccaccagtacgtacatgacgcacgaagcgtcggatgaactgatgcgtagcgcattgcataaattcaccaatgtcgacggcactaatggccgtacagtgttgccgttcccacatgatatgttttatgtgccggaatttcgcaagtatgacgaaatgtcatattccgaacgcattgaccagatccgcgacgaactgtctttgaacgaacgctctagtttagaggctttcattttattatgtagcggtggcaccctggaaaactccagctttggtgaatttctgcattggtgggcaatgtcgggttacacgtatcagggctgtatggattgtttaatgtcctataaatttaagggtggccagagtgcgttcgcgcgtcgcttctgggaagaagccgctggcactggccgtctgggctatgtctttggtactccggtgcgttctgtggtgaacgaacgcgacgcagtacgtgttaccgcacgtgacggtcgcgaattcgcagcgaaacgtttggtttgcacgattccgctgaacgtattgagttctgttcattttagcccaccactgtccccgcaacgcatggccgctgcgaacattggccatgttaaccagtgcgtcaaagtgcatgcggaagtcagtaacccagatatgcgttcatggtcgggtatctcctatccgttcaacaaattagcctacgctatcggcgatggcacgaccccagcgggtaatacgcatattgtgtgccttgggggggcccataatcatatccagccggaagaggacgtggaagcaacgaagatggccgttgaaaacatgtcgcctgggaatatggatatcaaacgtctggtcttccacaactggtgcaaggatgaatttgccaaaggcgcgtggttcttcgcccctccacagctgctgtcaaagagcctggatgaacgtcgcgcacgtcacggtaatgtcctgtttgcaaactccgattgggccttaggttggcgtggttttatcgatggtgctatcgaggagggcacccgcgcagcggttactgtaattgaggaactgcgtcctgcgcctgcggtgcgttcccacctg

SEQ ID NO: 708 - protein, 495 aa, synthetic construct
  REGION 1..495: note = Variant of monoamine oxidase
MTSRDGYQWTPETGLTQGVPSLGVISPPTNIEDTDKDGPWDVIVIGGGYCGLTATRDLTVAGFKTLLLEARDRIGGRSWSSNIDGYPYEMGGTWVHWHQPHVWREITRYKMHNALSPSFNFSRGVNHFQLRTNPTTSTYMTHEASDELMRSALHKFTNVDGTNGRTVLPFPHDMFYVPEFRKYDEMSYSERIDQIRDELSLNERSSLEAFILLCSGGTLENSSFGEFLHWWAMSGYTYQGCMDCLMSYKFKGGQSAFARRFWEEAAGTGRLGYVFGTPVRSVVNERDAVRVTARDGREFAAKRLVCTIPLNVLSSVHFSPPLSPQRMAAANIGHVNQCVKVHAEVSNPDMRSWSGISYPFNKLAYAIGDGTTPAGNTHIVCLGGAHNHIQPEEDVEATKMAVENMSPGNMDIKRLVFHNWCKDEFAKGAWFFAPPQLLSKSLDERRARHGNVLFANSDWALGWRGFIDGAIEEGTRAAVTVIEELRPAPAVRSHL

SEQ ID NO: 709 - DNA, 1485 bp, synthetic construct
  misc_feature 1..1485: note = Variant of monoamine oxidase
  source 1..1485: mol_type = other DNA
atgaccagccgcgacggctatcagtggaccccggaaacgggtctgacccagggcgtaccgtccctgggtgtcatttcgccgccgactaacatcgaagataccgataaggacgggccttgggatgtcattgtcattgggggcgggtattgtgggctgaccgcaacccgtgatttaaccgtcgcagggttcaagacgctgctgctggaggcccgtgatcgtattggtggccgctcctggagcagtaatattgacggttacccgtatgagatgggtggcacttgggttcattggcatcaaccgcacgtgtggcgtgaaatcacgcgttataaaatgcacaacgcgctgtctccatcatttaacttttcacgtggcgtgaatcacttccaactgcgtaccaatccgaccaccagtacgtacatgacgcacgaagcgtcggatgaactgctgcgtagcgcattgcataaattcaccaatgtcgacggcactaatggccgtacagtgttgccgttcccacatgatatgttttatgtgccggaatttcgcaagtatgacgaaatgtcatattccgaacgcattgaccagatccgcgacgaactgtctttgaacgaacgctctagtttagaggctttcattttattatgtagcggtggcaccctggaaaactccagctttggtgaatttctgcattggtgggcaatgtcgggttacacgtatcagggctgtatggattgtttaatttcctataaatttaaggatggccagagtgcgttcgcgcgtcgcttctgggaagaagccgctggcactggccgtctgggctatgtctttggtactccggtgcgttctgtggtgaacgaacgcgacgcagtacgtgttaccgcacgtgacggtcgcgaattcgcagcgaaacgtttggtttgcacgattccgctgaacgtattgagttctgttcattttagcccaccactgtccccgcaacgcatggccgctgcgaacattggccatgttaaccagtgcgtcaaagtgcatgcggaagtcagtaacccagatatgcgttcatggtcgggtatctcctatccgttcaacaaattagcctacgctatcggcgatggcacgaccccagcgggtaatacgcatattgtgtgccttgggggggcccataatcatatccagccggaagaggacgtggaagcaacgaagatggccgttgaaaacatgtcgcctgggaatatggatatcaaacgtctggtcttccacaactggtgcaaggatgaatttgccaaaggcgcgtggttcttcgcccctccacagctgctgtcaaagagcctggatgaactgcgctgtcgtcacggtaatgtcctgtttgcaaactccgattgggccttaggttggcgtggttttatcgatggtgctatcgaggagggcacccgcgcagcggttactgtaattgaggaactgcgtcctgcgcctgcggtgcgttcccacctg

SEQ ID NO: 710 - protein, 495 aa, synthetic construct
  REGION 1..495: note = Variant of monoamine oxidase
MTSRDGYQWTPETGLTQGVPSLGVISPPTNIEDTDKDGPWDVIVIGGGYCGLTATRDLTVAGFKTLLLEARDRIGGRSWSSNIDGYPYEMGGTWVHWHQPHVWREITRYKMHNALSPSFNFSRGVNHFQLRTNPTTSTYMTHEASDELLRSALHKFTNVDGTNGRTVLPFPHDMFYVPEFRKYDEMSYSERIDQIRDELSLNERSSLEAFILLCSGGTLENSSFGEFLHWWAMSGYTYQGCMDCLISYKFKDGQSAFARRFWEEAAGTGRLGYVFGTPVRSVVNERDAVRVTARDGREFAAKRLVCTIPLNVLSSVHFSPPLSPQRMAAANIGHVNQCVKVHAEVSNPDMRSWSGISYPFNKLAYAIGDGTTPAGNTHIVCLGGAHNHIQPEEDVEATKMAVENMSPGNMDIKRLVFHNWCKDEFAKGAWFFAPPQLLSKSLDELRCRHGNVLFANSDWALGWRGFIDGAIEEGTRAAVTVIEELRPAPAVRSHL

SEQ ID NO: 711 - DNA, 1485 bp, synthetic construct
  misc_feature 1..1485: note = Variant of monoamine oxidase
  source 1..1485: mol_type = other DNA
atgaccagccgcgacggctatcagtggaccccggaaacgggtctgacccagggcgtaccgtccctgggtgtcatttcgccgccgactaacatcgaagataccgataaggacgggccttgggatgtcattgtcattgggggcgggtattgtgggctgaccgcaacccgtgatttaaccgtcgcagggttcaagacgctgctgctggaggcccgtgatcgtattggtggccgctcctggagcagtaatattgacggttacccgtatgagatgggtggcacttgggttcattggcatcaaccgcacgtgtggcgtgaaatcacgcgttataaaatgcacaacgcgctgtctccatcatttaacttttcacgtggcgtgaatcacttccaactgcgtaccaatccgaccaccagtacgtacatgacgcacgaagcgtcggctgaactgatgcgtagcgcattgcataaattcaccaatgtcgacggcactaatggccgtacagtgttgccgttcccacatgatatgttttatgtgccggaatttcgcaagtatgacgaaatgtcatattccgaacgcattgaccagatccgcgacgaactgtctttgaacgaacgctctagtttagaggctttcattttattatgtagcggtggcaccctggaaaactccagctttggtgaatttctgcattggtgggcaatgtcgggttacacgtatcagggctgtatggattgtttaatctcctataaatttaaggatggccagagtgcgttcgcgcgtcgcttctgggaagaagccgctggcactggccgtctgggctatgtctttggttgcccggtgcgttctgtggtgaacgaacgcgacgcagtacgtgttaccgcacgtgacggtcgcgaattcgcagcgaaacgtttggtttgcacgattccgctgaacgtattgagttctgttcattttagcccaccactgtccccgcaacgcatggccgctgcgaacattggccatgttaaccagtgcgtcaaagtgcatgcggaagtcagttgtccggatatgcgttcatggtcgggtatctcctatccgttcaacaaattagcctacgctatcggcgatggcacgaccccagcgggtaatacgcatattgtgtgccttgggggggcccataatcatatccagccggaagaggacgtggaagcaacgaagatggccgttgaaaacatgtcgcctgggaatatggatatcaaacgtctggtcttccacaactggtgcaaggatgaatttgccaaaggcgcgtggttcttcgcccctccacagctgctgtcaaagagcctggatgaactgcgctgtcgtcacggtaatgtcctgtttgcaaactccgattgggccttaggttggcgtggttttatcgatggtgctatcgaggagggcacccgcgcagcggttactgtaattgaggaactgcgtcctgcgcctgcggtgcgttcccacctg

SEQ ID NO: 712 - protein, 495 aa, synthetic construct
  REGION 1..495: note = Variant of monoamine oxidase
MTSRDGYQWTPETGLTQGVPSLGVISPPTNIEDTDKDGPWDVIVIGGGYCGLTATRDLTVAGFKTLLLEARDRIGGRSWSSNIDGYPYEMGGTWVHWHQPHVWREITRYKMHNALSPSFNFSRGVNHFQLRTNPTTSTYMTHEASAELMRSALHKFTNVDGTNGRTVLPFPHDMFYVPEFRKYDEMSYSERIDQIRDELSLNERSSLEAFILLCSGGTLENSSFGEFLHWWAMSGYTYQGCMDCLISYKFKDGQSAFARRFWEEAAGTGRLGYVFGCPVRSVVNERDAVRVTARDGREFAAKRLVCTIPLNVLSSVHFSPPLSPQRMAAANIGHVNQCVKVHAEVSCPDMRSWSGISYPFNKLAYAIGDGTTPAGNTHIVCLGGAHNHIQPEEDVEATKMAVENMSPGNMDIKRLVFHNWCKDEFAKGAWFFAPPQLLSKSLDELRCRHGNVLFANSDWALGWRGFIDGAIEEGTRAAVTVIEELRPAPAVRSHL

SEQ ID NO: 713 - DNA, 1485 bp, synthetic construct
  misc_feature 1..1485: note = Variant of monoamine oxidase
  source 1..1485: mol_type = other DNA
atgaccagccgcgacggctatcagtggaccccggaaacgggtctgacccagggcgtaccgtccctgggtgtcatttcgccgccgactaacatcgaagataccgataaggacgggccttgggatgtcattgtcattgggggcgggtattgtgggctgaccgcaacccgtgatttaaccgtcgcagggttcaagacgctgctgctggaggcccgtgatcgtattggtggccgctcctggagcagtaatattgacggttacccgtatgagatgggtggcacttgggttcattggcatcaatcgcacgtgtggcgtgaaatcacgcgttataaaatgcacaacgcgctgtctccatcatttaacttttcacgtggcgtgaatcacttccaactgcgtaccaatccgaccaccagtacgtacatgacgcacgaagcgtcggatgaactgatgcgtagcgcattgcataaattcaccaatgtcgacggcactaatggccgtacagtgttgccgttcccacatgatatgttttatgtgccggaatttcgcaagtatgacgaaatgtcatattccgaacgcattgaccagatccgcgacgaactgtctttgaacgaacgctctagtttagaggctttcattttattatgtagcggtggcaccctggaaaactccagctttggtgaatttctgcattggtgggcaatgtcgggttacacgtatcagggctgtatggattgtttaatctcctataaatttaaggatggccagagtgcgttcgcgcgtcgcttctgggaagaagccgctggcactggccgtctgggctatgtctttggttgtccggtgcgttctgtggtgaacgaacgcgacgcagtacgtgttaccgcacgtgacggtcgcgaattcgcagcgaaacgtttggtttgcacgattccgctgaacgtattgagttctgttcattttagcccaccactgtccccgcaacgcatggccgctgcgaacattggccatgttaaccagtgcgtcaaagtgcatgcggaagtcagtaacccagatatgcgttcatggtcgggtatctcctatccgttcaacaaattagcctacgctatcggcgatggcacgaccccagcgggtaatacgcatattgtgtgccttgggggggcccataatcatatccagccggaagaggacgtggaagcaacgaagatggccgttgaaaacatgtcgcctgggaatatggatatcaaacgtctggtcttccacaactggtgcaaggatgaatttgccaaaggcgcgtggttcttcgcccctccacagctgctgtcaaagagcctggatgaactgcgcgcacgtcacggtaatgtcctgtttgcaaactccgattgggccttaggttggcgtggttttatcgatggtgctatcgaggagggcacccgcgcagcggttactgtaattgaggaactgcgtcctgcgcctgcggtgcgttcccacctg

SEQ ID NO: 714 - protein, 495 aa, synthetic construct
  REGION 1..495: note = Variant of monoamine oxidase
MTSRDGYQWTPETGLTQGVPSLGVISPPTNIEDTDKDGPWDVIVIGGGYCGLTATRDLTVAGFKTLLLEARDRIGGRSWSSNIDGYPYEMGGTWVHWHQSHVWREITRYKMHNALSPSFNFSRGVNHFQLRTNPTTSTYMTHEASDELMRSALHKFTNVDGTNGRTVLPFPHDMFYVPEFRKYDEMSYSERIDQIRDELSLNERSSLEAFILLCSGGTLENSSFGEFLHWWAMSGYTYQGCMDCLISYKFKDGQSAFARRFWEEAAGTGRLGYVFGCPVRSVVNERDAVRVTARDGREFAAKRLVCTIPLNVLSSVHFSPPLSPQRMAAANIGHVNQCVKVHAEVSNPDMRSWSGISYPFNKLAYAIGDGTTPAGNTHIVCLGGAHNHIQPEEDVEATKMAVENMSPGNMDIKRLVFHNWCKDEFAKGAWFFAPPQLLSKSLDELRARHGNVLFANSDWALGWRGFIDGAIEEGTRAAVTVIEELRPAPAVRSHL

SEQ ID NO: 715 - DNA, 1485 bp, synthetic construct
  misc_feature 1..1485: note = Variant of monoamine oxidase
  source 1..1485: mol_type = other DNA
atgaccagccgcgacggctatcagtggaccccggaaacgggtctgacccagggcgtaccgtccctgggtgtcatttcgccgccgactaacatcgaagataccgataaggacgggccttgggatgtcattgtcattgggggcgggtattgtgggctgaccgcaacccgtgatttaaccgtcgcagggttcaagacgctgctgctggaggcccgtgatcgtattggtggccgctcctggagcagtaatattgacggttacccgtatgagatgggtggcacttgggttcattggcatcaatcgcacgtgtggcgtgaaatcacgcgttataaaatgcacaacgcgctgtctccatcatttaacttttcacgtggcgtgaatcacttccaactgcgtaccaatccgaccaccagtacgtacatgacgcacgaagcggaggatgaactgatgcgtagcgcattgcataaattcaccaatgtcgacggcactaatggccgtacagtgttgccgttcccacatgatatgttttatgtgccggaatttcgcaagtatgacgaaatgtcatattccgaacgcattgaccagatccgcgacgaactgtctttgaacgaacgctctagtttagaggctttcattttattatgtagcggtggcaccctggaaaactccagctttggtgaatttctgcattggtgggcaatgtcgggttacacgtatcagggctgtatggattgtttaatctcctataaatttaaggatggccagagtgcgttcgcgcgtcgcttctgggaagaagccgctggcactggccgtctgggctatgtctttggttgcccggtgcgttctgtggtgaacgaacgcgacgcagtacgtgttaccgcacgtgacggtcgcgaattcgcagcgaaacgtttggtttgcacgattccgctgaacgtattgagttctgttcattttagcccaccactgtccccgcaacgcatggccgctgcgaacattggccatgttaaccagtgcgtcaaagtgcatgcggaagtcagtaacaaggatatgcgttcatggtcgggtatctcctatccgttcaacaaattagcctacgctatcggcgatggcacgaccccagcgggtaatacgcatattgtgtgccttgggggggcccataatcatatccagccggaagaggacgtggaagcaacgaagatggccgttgaaaacatgtcgcctgggaatatggatatcaaacgtctggtcttccacaactggtgcaaggatgaatttgccaaaggcgcgtggttcttcgcccctccacagctgctgtcaaagagcctggatgaacgtcgcgcacgtcacggtaatgtcctgtttgcaaactccgattgggccttaggttggcgtggttttatcgatggtgctatcgaggagggcacccgcgcagcggttactgtaattgaggaactgcgtcctgcgcctgcggtgcgttcccacctg

SEQ ID NO: 716 - protein, 495 aa, synthetic construct
  REGION 1..495: note = Variant of monoamine oxidase
MTSRDGYQWTPETGLTQGVPSLGVISPPTNIEDTDKDGPWDVIVIGGGYCGLTATRDLTVAGFKTLLLEARDRIGGRSWSSNIDGYPYEMGGTWVHWHQSHVWREITRYKMHNALSPSFNFSRGVNHFQLRTNPTTSTYMTHEAEDELMRSALHKFTNVDGTNGRTVLPFPHDMFYVPEFRKYDEMSYSERIDQIRDELSLNERSSLEAFILLCSGGTLENSSFGEFLHWWAMSGYTYQGCMDCLISYKFKDGQSAFARRFWEEAAGTGRLGYVFGCPVRSVVNERDAVRVTARDGREFAAKRLVCTIPLNVLSSVHFSPPLSPQRMAAANIGHVNQCVKVHAEVSNKDMRSWSGISYPFNKLAYAIGDGTTPAGNTHIVCLGGAHNHIQPEEDVEATKMAVENMSPGNMDIKRLVFHNWCKDEFAKGAWFFAPPQLLSKSLDERRARHGNVLFANSDWALGWRGFIDGAIEEGTRAAVTVIEELRPAPAVRSHL

SEQ ID NO: 717 - DNA, 1485 bp, synthetic construct
  misc_feature 1..1485: note = Variant of monoamine oxidase
  source 1..1485: mol_type = other DNA
atgaccagccgcgacggctatcagtggaccccggaaacgggtctgacccagggcgtaccgtccctgggtgtcatttcgccgccgactaacatcgaagataccgataaggacgggccttgggatgtcattgtcattgggggcgggtattgtgggctgaccgcaacccgtgatttaaccgtcgcagggttcaagacgctgctgctggaggcccgtgatcgtattggtggccgctcctggagcagtaatattgacggttacccgtatgagatgggtggcacttgggttcattggcatcaatcgcacgtgtggcgtgaaatcacgcgttataaaatgcacaacgcgctgtctccatcatttaacttttcacgtggcgtgaatcacttccaactgcgtaccaatccgaccaccagtacgtacatgacgcacgaagcgtcggatgaactgatgcgtagcgcattgcataaattcaccaatgtcgacggcactaatggccgtacagtgttgccgttcccacatgatatgttttatgtgccggaatttcgcaagtatgacgaaatgtcatattccgaacgcattgaccagatccgcgacgatctgtctttgaacgaacgctctagtttagaggctttcattttattatgtagcggtggcaccctggaaaactccagctttggtgaatttctgcattggtgggcaatgtcgggttacacgtatcagggctgtatggattgtttaatgtcctataaatttaaggatggccagagtgcgttcgcgcgtcgcttctgggaagaagccgctggcactggccgtctgggctatgtctttggttgtccggtgcgttctgtggtgaacgaacgcgacgcagtacgtgttaccgcacgtgacggtcgcgaattcgcagcgaaacgtttggtttgcacgattccgctgaacgtattgagttctgttcattttagcccaccactgtccccgcaacgcatggccgctgcgaacattggccatgttaaccagtgcgtcaaagtgcatgcggaagtcagttgcccagatatgcgttcatggtcgggtatctcctatccgttcaacaaattagcctacgctatcggcgatggcacgaccccagcgggtaatacgcatattgtgtgccttgggggggcccataatcatatccagccggaagaggacgtggaagcaacgaagatggccgttgaaaacatgtcgcctgggaatatggatatcaaacgtctggtcttccacaactggtgcaaggatgaatttgccaaaggcgcgtggttcttcgcccctccacagctgctgtcaaagagcctggatgaactgcgcgcacgtcacggtaatgtcctgtttgcaaactccgattgggccttaggttggcgtggttttatcgatggtgctatcgaggagggcacccgcgcagcggttactgtaattgaggaactgcgtcctgcgcctgcggtgcgttcccacctg

SEQ ID NO: 718 - protein, 495 aa, synthetic construct
  REGION 1..495: note = Variant of monoamine oxidase
MTSRDGYQWTPETGLTQGVPSLGVISPPTNIEDTDKDGPWDVIVIGGGYCGLTATRDLTVAGFKTLLLEARDRIGGRSWSSNIDGYPYEMGGTWVHWHQSHVWREITRYKMHNALSPSFNFSRGVNHFQLRTNPTTSTYMTHEASDELMRSALHKFTNVDGTNGRTVLPFPHDMFYVPEFRKYDEMSYSERIDQIRDDLSLNERSSLEAFILLCSGGTLENSSFGEFLHWWAMSGYTYQGCMDCLMSYKFKDGQSAFARRFWEEAAGTGRLGYVFGCPVRSVVNERDAVRVTARDGREFAAKRLVCTIPLNVLSSVHFSPPLSPQRMAAANIGHVNQCVKVHAEVSCPDMRSWSGISYPFNKLAYAIGDGTTPAGNTHIVCLGGAHNHIQPEEDVEATKMAVENMSPGNMDIKRLVFHNWCKDEFAKGAWFFAPPQLLSKSLDELRARHGNVLFANSDWALGWRGFIDGAIEEGTRAAVTVIEELRPAPAVRSHL

SEQ ID NO: 719 - DNA, 1485 bp, synthetic construct
  misc_feature 1..1485: note = Variant of monoamine oxidase
  source 1..1485: mol_type = other DNA
atgaccagccgcgacggctatcagtggaccccggaaacgggtctgacccagggcgtaccgtccctgggtgtcatttcgccgccgactaacatcgaagataccgataaggacgggccttgggatgtcattgtcattgggggcgggtattgtgggctgaccgcaacccgtgatttaaccgtcgcagggttcaagacgctgctgctggaggcccgtgatcgtattggtggccgctcctggagcagtaatattgacggttacccgtatgagatgggtggcacttgggttcattggcatcaatcgcacgtgtggcgtgaaatcacgcgttataaaatgcacaacgcgctgtctccatcatttaacttttcacgtggcgtgaatcacttccaactgcgtaccaatccgaccaccagtacgtacatgacgcacgaagcggaggctgaactgctgcgtagcgcattgcataaattcaccaatgtcgacggcactaatggccgtacagtgttgccgttcccacatgatatgttttatgtgccggaatttcgcaagtatgacgaaatgtcatattccgaacgcattgaccagatccgcgacgaactgtctttgaacgaacgctctagtttagaggctttcattttattatgtagcggtggcaccctggaaaactccagctttggtgaatttctgcattggtgggcaatgtcgggttacacgtatcagggctgtatggattgtttaatgtcctataaatttaaggatggccagagtgcgttcgcgcgtcgcttctgggaagaagccgctggcactggccgtctgggctatgtctttggtactccggtgcgttctgtggtgaacgaacgcgacgcagtacgtgttaccgcacgtgacggtcgcgaattcgcagcgaaacgtttggtttgcacgattccgctgaacgtattgagttctgttcattttagcccaccactgtccccgcaacgcatggccgctgcgaacattggccatgttaaccagtgcgtcaaagtgcatgcggaagtcagttgcaaggatatgcgttcatggtcgggtatctcctatccgttcaacaaattagcctacgctatcggcgatggcacgaccccagcgggtaatacgcatattgtgtgccttgggggggcccataatcatatccagccggaagaggacgtggaagcaacgaagatggccgttgaaaacatgtcgcctgggaatatggatatcaaacgtctggtcttccacaactggtgcaaggatgaatttgccaaaggcgcgtggttcttcgcccctccacagctgctgtcaaagagcctggatgaacgtcgcgcacgtcacggtaatgtcctgtttgcaaactccgattgggccttaggttggcgtggttttatcgatggtgctatcgaggagggcacccgcgcagcggttactgtaattgaggaactgcgtcctgcgcctgcggtgcgttcccacctg

SEQ ID NO: 720 - protein, 495 aa, synthetic construct
  REGION 1..495: note = Variant of monoamine oxidase
MTSRDGYQWTPETGLTQGVPSLGVISPPTNIEDTDKDGPWDVIVIGGGYCGLTATRDLTVAGFKTLLLEARDRIGGRSWSSNIDGYPYEMGGTWVHWHQSHVWREITRYKMHNALSPSFNFSRGVNHFQLRTNPTTSTYMTHEAEAELLRSALHKFTNVDGTNGRTVLPFPHDMFYVPEFRKYDEMSYSERIDQIRDELSLNERSSLEAFILLCSGGTLENSSFGEFLHWWAMSGYTYQGCMDCLMSYKFKDGQSAFARRFWEEAAGTGRLGYVFGTPVRSVVNERDAVRVTARDGREFAAKRLVCTIPLNVLSSVHFSPPLSPQRMAAANIGHVNQCVKVHAEVSCKDMRSWSGISYPFNKLAYAIGDGTTPAGNTHIVCLGGAHNHIQPEEDVEATKMAVENMSPGNMDIKRLVFHNWCKDEFAKGAWFFAPPQLLSKSLDERRARHGNVLFANSDWALGWRGFIDGAIEEGTRAAVTVIEELRPAPAVRSHL

SEQ ID NO: 721 - DNA, 1485 bp, synthetic construct
  misc_feature 1..1485: note = Variant of monoamine oxidase
  source 1..1485: mol_type = other DNA
atgaccagccgcgacggctatcagtggaccccggaaacgggtctgacccagggcgtaccgtccctgggtgtcatttcgccgccgactaacatcgaagataccgataaggacgggccttgggatgtcattgtcattgggggcgggtattgtgggctgaccgcaacccgtgatttaaccgtcgcagggttcaagacgctgctgctggaggcccgtgatcgtattggtggccgctcctggagcagtaatattgacggttacccgtatgagatgggtggcacttgggttcattggcatcaaccgcacgtgtggcgtgaaatcacgcgttataaaatgcacaacgcgctgtctccatcatttaacttttcacgtggcgtgaatcacttccaactgcgtaccaatccgaccaccagtacgtacatgacgcacgaagcgtcggctgaactgatgcgtagcgcattgcataaattcaccaatgtcgacggcactaatggccgtacagtgttgccgttcccacatgatatgttttatgtgccggaatttcgcaagtatgacgaaatgtcatattccgaacgcattgaccagatccgcgacgaactgtctttgaacgaacgctctagtttagaggctttcattttattatgtagcggtggcaccctggaaaactccagctttggtgaatttctgcattggtgggcaatgtcgggttacacgtatcagggctgtattgattgtttaatttcctataaatttaaggatggccagagtgcgttcgcgcgtcgcttctgggaagaagccgctggcactggccgtctgggctatgtctttggttgtccggtgcgttctgtggtgaacgaacgcgacgcagtacgtgttaccgcacgtgacggtcgcgaattcgcagcgaaacgtttggtttgcacgattccgctgaacgtattgagttctgttcattttagcccaccactgtccccgcaacgcatggccgctgcgaacattggccatgttaaccagtgcgtcaaagtgcatgcggaagtcagttgcccagatatgcgttcatggtcgggtatctcctatccgttcaacaaattagcctacgctatcggcgatggcacgaccccagcgggtaatacgcatattgtgtgccttgggggggcccataatcatatccagccggaagaggacgtggaagcaacgaagatggccgttgaaaacatgtcgcctgggaatatggatatcaaacgtctggtcttccacaactggtgcaaggatgaatttgccaaaggcgcgtggttcttcgcccctccacagctgctgtcaaagagcctggatgaacgtcgctgtcgtcacggtaatgtcctgtttgcaaactccgattgggccttaggttggcgtggttttatcgatggtgctatcgaggagggcacccgcgcagcggttactgtaattgaggaactgcgtcctgcgcctgcggtgcgttcccacctg

SEQ ID NO: 722 - protein, 495 aa, synthetic construct
  REGION 1..495: note = Variant of monoamine oxidase
MTSRDGYQWTPETGLTQGVPSLGVISPPTNIEDTDKDGPWDVIVIGGGYCGLTATRDLTVAGFKTLLLEARDRIGGRSWSSNIDGYPYEMGGTWVHWHQPHVWREITRYKMHNALSPSFNFSRGVNHFQLRTNPTTSTYMTHEASAELMRSALHKFTNVDGTNGRTVLPFPHDMFYVPEFRKYDEMSYSERIDQIRDELSLNERSSLEAFILLCSGGTLENSSFGEFLHWWAMSGYTYQGCIDCLISYKFKDGQSAFARRFWEEAAGTGRLGYVFGCPVRSVVNERDAVRVTARDGREFAAKRLVCTIPLNVLSSVHFSPPLSPQRMAAANIGHVNQCVKVHAEVSCPDMRSWSGISYPFNKLAYAIGDGTTPAGNTHIVCLGGAHNHIQPEEDVEATKMAVENMSPGNMDIKRLVFHNWCKDEFAKGAWFFAPPQLLSKSLDERRCRHGNVLFANSDWALGWRGFIDGAIEEGTRAAVTVIEELRPAPAVRSHL

SEQ ID NO: 723 - DNA, 1485 bp, synthetic construct
  misc_feature 1..1485: note = Variant of monoamine oxidase
  source 1..1485: mol_type = other DNA
atgaccagccgcgacggctatcagtggaccccggaaacgggtctgacccagggcgtaccgtccctgggtgtcatttcgccgccgactaacatcgaagataccgataaggacgggccttgggatgtcattgtcattgggggcgggtattgtgggctgaccgcaacccgtgatttaaccgtcgcagggttcaagacgctgctgctggaggcccgtgatcgtattggtggccgctcctggagcagtaatattgacggttacccgtatgagatgggtggcacttgggttcattggcatcaatcgcacgtgtggcgtgaaatcacgcgttataaaatgcacaacgcgctgtctccatcatttaacttttcacgtggcgtgaatcacttccaactgcgtaccaatccgaccaccagtacgtacatgacgcacgaagcgtcggctgaactgatgcgtagcgcattgcataaattcaccaatgtcgacggcactaatggccgtacagtgttgccgttcccacatgatatgttttatgtgccggaatttcgcaagtatgacgaaatgtcatattccgaacgcattgaccagatccgcgacgaactgtctttgaacgaacgcactagtttagaggctttcattttattatgtagcggtggcaccctggaaaactccagctttggtgaatttctgcattggtgggcaatgtcgggttacacgtatcagggctgtatggattgtttaatctcctataaatttaaggatggccagagtgcgttcgcgcgtcgcttctgggaagaagccgctggcactggccgtctgggctatgtctttggttgtccggtgcgttctgtggtgaacgaacgcgacgcagtacgtgttaccgcacgtgacggtcgcgaattcgcagcgaaacgtttggtttgcacgattccgctgaacgtattgagttctgttcattttagcccaccactgtccccgcaacgcatggccgctgcgaacattggccatgttaaccagtgcgtcaaagtgcatgcggaagtcagttgcaaggatatgcgttcatggtcgggtatctcctatccgttcaacaaattagcctacgctatcggcgatggcacgaccccagcgggtaatacgcatattgtgtgccttgggggggcccataatcatatccagccggaagaggacgtggaagcaacgaagatggccgttgaaaacatgtcgcctgggaatatggatatcaaacgtctggtcttccacaactggtgcaaggatgaatttgccaaaggcgcgtggttcttcgcccctccacagctgctgtcaaagagcctggatgaactgcgcgcacgtcacggtaatgtcctgtttgcaaactccgattgggccttaggttggcgtggttttatcgatggtgctatcgaggagggcacccgcgcagcggttactgtaattgaggaactgcgtcctgcgcctgcggtgcgttcccacctg

SEQ ID NO: 724 - protein, 495 aa, synthetic construct
  REGION 1..495: note = Variant of monoamine oxidase
MTSRDGYQWTPETGLTQGVPSLGVISPPTNIEDTDKDGPWDVIVIGGGYCGLTATRDLTVAGFKTLLLEARDRIGGRSWSSNIDGYPYEMGGTWVHWHQSHVWREITRYKMHNALSPSFNFSRGVNHFQLRTNPTTSTYMTHEASAELMRSALHKFTNVDGTNGRTVLPFPHDMFYVPEFRKYDEMSYSERIDQIRDELSLNERTSLEAFILLCSGGTLENSSFGEFLHWWAMSGYTYQGCMDCLISYKFKDGQSAFARRFWEEAAGTGRLGYVFGCPVRSVVNERDAVRVTARDGREFAAKRLVCTIPLNVLSSVHFSPPLSPQRMAAANIGHVNQCVKVHAEVSCKDMRSWSGISYPFNKLAYAIGDGTTPAGNTHIVCLGGAHNHIQPEEDVEATKMAVENMSPGNMDIKRLVFHNWCKDEFAKGAWFFAPPQLLSKSLDELRARHGNVLFANSDWALGWRGFIDGAIEEGTRAAVTVIEELRPAPAVRSHL

SEQ ID NO: 725 - DNA, 1485 bp, synthetic construct
  misc_feature 1..1485: note = Variant of monoamine oxidase
  source 1..1485: mol_type = other DNA
atgaccagccgcgacggctatcagtggaccccggaaacgggtctgacccagggcgtaccgtccctgggtgtcatttcgccgccgactaacatcgaagataccgataaggacgggccttgggatgtcattgtcattgggggcgggtattgtgggctgaccgcaacccgtgatttaaccgtcgcagggttcaagacgctgctgctggaggcccgtgatcgtattggtggccgctcctggcacagtaatattgacggttacccgtatgagatgggtggcacttgggttcattggcatcaatctcacgtgtggcgtgaaatcacgcgttataaaatgcacaacgcgctgtctccatcatttaacttttcacgtggcgtgaatcacttccaactgcgtaccaatccgaccaccagtacgtacatgacgcacgaagcggaggatgaactgctgcgtagcgcattgcataaattcaccaatgtcgacggcactaatggccgtacagtgttgccgttcccacatgatatgttttatgtgccggaatttcgcaagtatgacgaaatgtcatattccgaacgcattgaccagatccgcgacgaactgtctttgaacgaacgctctagtttagaggctttcattttattatgtagcggtggcaccctggaaaactccagctttggtgaatttctgcattggtgggcaatgtcgggttacacgcgtcagggctgtatggattgtttaatctcctataaatttaaggatggccagagtgcgttcgcgcgtcgcttctgggaagaagccgctggcactggccgtctgggctatgtctttggttgtccggtgcgttctgtggtgaacgaacgcgacgcagtacgtgttaccgcacgtgacggtcgcgaattcgcagcgaaacgtttggtttgcacgattccgctgaacgtattgagttctgttcattttagcccaccactgtccccgcaacgcatggccgctgcgaacatcggccatgttaaccagtgcgtcaaagtgcatgcggaagtcagttgtccggatatgcgttcatggtcgggtatctcctatccgttcaacaaattagcctacgctatcggcgatggcacgaccccagcgggtaatacgcatattgtgtgccttgggggggccgagaatcatatccagccggaagaggacgtggaagcaacgaagatggccgttgaaaacatgtcgcctgggaatatggatatcaaacgtctggtcttccacaactggtgcaaggatgaatttgccaaaggcgggtggttcttcgcccctccacagctgctgtcaaagagcctggatgaactgcgctgccgtcacggtaatgtcctgtttgcaaactccgattgggccttaggttggcgtggttttatcgatggtgctatcgaggagggcacccgcgcagcggttactgtaattgaggaactgcgtcctgcgcctgcggtgcgttcccacctg

SEQ ID NO: 726 - protein, 495 aa, synthetic construct
  REGION 1..495: note = Variant of monoamine oxidase
MTSRDGYQWTPETGLTQGVPSLGVISPPTNIEDTDKDGPWDVIVIGGGYCGLTATRDLTVAGFKTLLLEARDRIGGRSWHSNIDGYPYEMGGTWVHWHQSHVWREITRYKMHNALSPSFNFSRGVNHFQLRTNPTTSTYMTHEAEDELLRSALHKFTNVDGTNGRTVLPFPHDMFYVPEFRKYDEMSYSERIDQIRDELSLNERSSLEAFILLCSGGTLENSSFGEFLHWWAMSGYTRQGCMDCLISYKFKDGQSAFARRFWEEAAGTGRLGYVFGCPVRSVVNERDAVRVTARDGREFAAKRLVCTIPLNVLSSVHFSPPLSPQRMAAANIGHVNQCVKVHAEVSCPDMRSWSGISYPFNKLAYAIGDGTTPAGNTHIVCLGGAENHIQPEEDVEATKMAVENMSPGNMDIKRLVFHNWCKDEFAKGGWFFAPPQLLSKSLDELRCRHGNVLFANSDWALGWRGFIDGAIEEGTRAAVTVIEELRPAPAVRSHL

SEQ ID NO: 727 - DNA, 1485 bp, synthetic construct
  misc_feature 1..1485: note = Variant of monoamine oxidase
  source 1..1485: mol_type = other DNA
atgaccagccgcgacggctatcagtggaccccggaaacgggtctgacccagggcgtaccgtccctgggtgtcatttcgccgccgactaacatcgaagataccgataaggacgggccttgggatgtcattgtcattgggggcgggtattgtgggctgaccgcaacccgtgatttaaccgtcgcagggttcaagacgctgctgctggaggcccgtgatcgtattggtggccgctcctggagcagtaatattgacggttacccgtatgagatgggtggcacttgggttcattggcatcaatcgcacgtgtggcgtgaaatcacgcgttataaaatgcacaacgcgctgtctccatcatttaacttttcacgtggcgtgaatcacttccaactgcgtaccaatccgaccaccagtacgtacatgacgcacgaagcggaggctgaactgctgcgtagcgcattgcataaattcaccaatgtcgacggcactaatggccgtacagtgttgccgttcccacatgatatgttttatgtgccggaatttcgcaagtatgacgaaatgtcatattccgaacgcattgaccagatccgcgacgatctgtctttgaacgaacgctctagtttagaggctttcattttattatgtagcggtggcaccctggaaaactccagctttggtgaatttctgcattggtgggcaatgtcgggttacacgtatcagggctgtatggattgtttaatctcctataaatttaaggatggccagagtgcgttcgcgcgtcgcttctgggaagaagccgctggcactggccgtctgggctatgtctttggtactccggtgcgttctgtggtgaacgaacgcgacgcagtacgtgttaccgcacgtgacggtcgcgaattcgcagcgaaacgtttggtttgcacgattccgctgaacgtattgagttctgttcattttagcccaccactgtccccgcaacgcatggccgctgcgaacattggccatgttaaccagtgcgtcaaagtgcatgcggaagtcagttgcaaggatatgcgttcatggtcgggtatctcctatccgttcaacaaattagcctacgctatcggcgatggcacgaccccagcgggtaatacgcatattgtgtgccttgggggggcccataatcatatccagccggaagaggacgtggaagcaacgaagatggccgttgaaaacatgtcgcctgggaatatggatatcaaacgtctggtcttccacaactggtgcaaggatgaatttgccaaaggcgcgtggttcttcgcccctccacagctgctgtcaaagagcctggatgaactgcgcgcacgtcacggtaatgtcctgtttgcaaactccgattgggccttaggttggcgtggttttatcgatggtgctatcgaggagggcacccgcgcagcggttactgtaattgaggaactgcgtcctgcgcctgcggtgcgttcccacctg

SEQ ID NO: 728 - protein, 495 aa, synthetic construct
  REGION 1..495: note = Variant of monoamine oxidase
MTSRDGYQWTPETGLTQGVPSLGVISPPTNIEDTDKDGPWDVIVIGGGYCGLTATRDLTVAGFKTLLLEARDRIGGRSWSSNIDGYPYEMGGTWVHWHQSHVWREITRYKMHNALSPSFNFSRGVNHFQLRTNPTTSTYMTHEAEAELLRSALHKFTNVDGTNGRTVLPFPHDMFYVPEFRKYDEMSYSERIDQIRDDLSLNERSSLEAFILLCSGGTLENSSFGEFLHWWAMSGYTYQGCMDCLISYKFKDGQSAFARRFWEEAAGTGRLGYVFGTPVRSVVNERDAVRVTARDGREFAAKRLVCTIPLNVLSSVHFSPPLSPQRMAAANIGHVNQCVKVHAEVSCKDMRSWSGISYPFNKLAYAIGDGTTPAGNTHIVCLGGAHNHIQPEEDVEATKMAVENMSPGNMDIKRLVFHNWCKDEFAKGAWFFAPPQLLSKSLDELRARHGNVLFANSDWALGWRGFIDGAIEEGTRAAVTVIEELRPAPAVRSHL

SEQ ID NO: 729 - DNA, 1485 bp, synthetic construct
  misc_feature 1..1485: note = Variant of monoamine oxidase
  source 1..1485: mol_type = other DNA
atgaccagccgcgacggctatcagtggaccccggaaacgggtctgacccagggcgtaccgtccctgggtgtcatttcgccgccgactaacatcgaagataccgataaggacgggccttgggatgtcattgtcattgggggcgggtattgtgggctgaccgcaacccgtgatttaaccgtcgcagggttcaagacgctgctgctggaggcccgtgatcgtattggtggccgctcctggagcagtaatattgacggttacccgtatgagatgggtggcacttgggttcattggcatcaatcgcacgtgtggcgtgaaatcacgcgttataaaatgcacaacgcgctgtctccatcatttaacttttcacgtggcgtgaatcacttccaactgcgtaccaatccgaccaccagtacgtacatgacgcacgaagcgtcggatgaactgatgcgtagcgcattgcataaattcaccaatgtcgacggcactaatggccgtacagtgttgccgttcccacatgatatgttttatgtgccggaatttcgcaagtatgacgaaatgtcatattccgaacgcattgaccagatccgcgacgaactgtctttgaacgaacgctctagtttagaggctttcattttattatgtagcggtggcaccctggaaaactccagctttggtgaatttctgcattggtgggcaatgtcgggttacacgtatcagggctgtattgattgtttaatttcctataaatttaaggatggccagagtgcgttcgcgcgtcgcttctgggaagaagccgctggcactggccgtctgggctatgtctttggttgtccggtgcgttctgtggtgaacgaacgcgacgcagtacgtgttaccgcacgtgacggtcgcgaattcgcagcgaaacgtttggtttgcacgattccgctgaacgtattgagttctgttcattttagcccaccactgtccccgcaacgcatggccgctgcgaacattggccatgttaaccagtgcgtcaaagtgcatgcggaagtcagttgcccagatatgcgttcatggtcgggtatctcctatccgttcaacaaattagcctacgctatcggcgatggcacgaccccagcgggtaatacgcatattgtgtgccttgggggggcccataatcatatccagccggaagaggacgtggaagcaacgaagatggccgttgaaaacatgtcgcctgggaatatggatatcaaacgtctggtcttccacaactggtgcaaggatgaatttgccaaaggcgcgtggttcttcgcccctccacagctgctgtcaaagagcctggatgaactgcgctgtcgtcacggtaatgtcctgtttgcaaactccgattgggccttaggttggcgtggttttatcgatggtgctatcgaggagggcacccgcgcagcggttactgtaattgaggaactgcgtcctgcgcctgcggtgcgttcccacctg

SEQ ID NO: 730 - protein, 495 aa, synthetic construct
  REGION 1..495: note = Variant of monoamine oxidase
MTSRDGYQWTPETGLTQGVPSLGVISPPTNIEDTDKDGPWDVIVIGGGYCGLTATRDLTVAGFKTLLLEARDRIGGRSWSSNIDGYPYEMGGTWVHWHQSHVWREITRYKMHNALSPSFNFSRGVNHFQLRTNPTTSTYMTHEASDELMRSALHKFTNVDGTNGRTVLPFPHDMFYVPEFRKYDEMSYSERIDQIRDELSLNERSSLEAFILLCSGGTLENSSFGEFLHWWAMSGYTYQGCIDCLISYKFKDGQSAFARRFWEEAAGTGRLGYVFGCPVRSVVNERDAVRVTARDGREFAAKRLVCTIPLNVLSSVHFSPPLSPQRMAAANIGHVNQCVKVHAEVSCPDMRSWSGISYPFNKLAYAIGDGTTPAGNTHIVCLGGAHNHIQPEEDVEATKMAVENMSPGNMDIKRLVFHNWCKDEFAKGAWFFAPPQLLSKSLDELRCRHGNVLFANSDWALGWRGFIDGAIEEGTRAAVTVIEELRPAPAVRSHL

SEQ ID NO: 731 - DNA, 1485 bp, synthetic construct
  misc_feature 1..1485: note = Variant of monoamine oxidase
  source 1..1485: mol_type = other DNA
atgaccagccgcgacggctatcagtggaccccggaaacgggtctgacccagggcgtaccgtccctgggtgtcatttcgccgccgactaacatcgaagataccgataaggacgggccttgggatgtcattgtcattgggggcgggtattgtgggctgaccgcaacccgtgatttaaccgtcgcagggttcaagacgctgctgctggaggcccgtgatcgtattggtggccgctcctggagcagtaatattgacggttacccgtatgagatgggtggcacttgggttcattggcatcaaccgcacgtgtggcgtgaaatcacgcgttataaaatgcacaacgcgctgtctccatcatttaacttttcacgtggcgtgaatcacttccaactgcgtaccaatccgaccaccagtacgtacatgacgcacgaagcggaggatgaactgctgcgtagcgcattgcataaattcaccaatgtcgacggcactaatggccgtacagtgttgccgttcccacatgatatgttttatgtgccggaatttcgcaagtatgacgaaatgtcatattccgaacgcattgaccagatccgcgacgatctgtctttgaacgaacgctctagtttagaggctttcattttattatgtagcggtggcaccctggaaaactccagctttggtgaatttctgcattggtgggcaatgtcgggttacacgtatcagggctgtatggattgtttaatctcctataaatttaaggatggccagagtgcgttcgcgcgtcgcttctgggaagaagccgctggcactggccgtctgggctatgtctttggttgcccggtgcgttctgtggtgaacgaacgcgacgcagtacgtgttaccgcacgtgacggtcgcgaattcgcagcgaaacgtttggtttgcacgattccgctgaacgtattgagttctgttcattttagcccaccactgtccccgcaacgcatggccgctgcgaacattggccatgttaaccagtgcgtcaaagtgcatgcggaagtcagtaacccagatatgcgttcatggtcgggtatctcctatccgttcaacaaattagcctacgctatcggcgatggcacgaccccagcgggtaatacgcatattgtgtgccttgggggggcccataatcatatccagccggaagaggacgtggaagcaacgaagatggccgttgaaaacatgtcgcctgggaatatggatatcaaacgtctggtcttccacaactggtgcaaggatgaatttgccaaaggcgcgtggttcttcgcccctccacagctgctgtcaaagagcctggatgaacgtcgctgtcgtcacggtaatgtcctgtttgcaaactccgattgggccttaggttggcgtggttttatcgatggtgctatcgaggagggcacccgcgcagcggttactgtaattgaggaactgcgtcctgcgcctgcggtgcgttcccacctg

SEQ ID NO: 732 - protein, 495 aa, synthetic construct
  REGION 1..495: note = Variant of monoamine oxidase
MTSRDGYQWTPETGLTQGVPSLGVISPPTNIEDTDKDGPWDVIVIGGGYCGLTATRDLTVAGFKTLLLEARDRIGGRSWSSNIDGYPYEMGGTWVHWHQPHVWREITRYKMHNALSPSFNFSRGVNHFQLRTNPTTSTYMTHEAEDELLRSALHKFTNVDGTNGRTVLPFPHDMFYVPEFRKYDEMSYSERIDQIRDDLSLNERSSLEAFILLCSGGTLENSSFGEFLHWWAMSGYTYQGCMDCLISYKFKDGQSAFARRFWEEAAGTGRLGYVFGCPVRSVVNERDAVRVTARDGREFAAKRLVCTIPLNVLSSVHFSPPLSPQRMAAANIGHVNQCVKVHAEVSNPDMRSWSGISYPFNKLAYAIGDGTTPAGNTHIVCLGGAHNHIQPEEDVEATKMAVENMSPGNMDIKRLVFHNWCKDEFAKGAWFFAPPQLLSKSLDERRCRHGNVLFANSDWALGWRGFIDGAIEEGTRAAVTVIEELRPAPAVRSHL

SEQ ID NO: 733 - DNA, 1485 bp, synthetic construct
  misc_feature 1..1485: note = Variant of monoamine oxidase
  source 1..1485: mol_type = other DNA
atgaccagccgcgacggctatcagtggaccccggaaacgggtctgacccagggcgtaccgtccctgggtgtcatttcgccgccgactaacatcgaagataccgataaggacgggccttgggatgtcattgtcattgggggcgggtattgtgggctgaccgcaacccgtgatttaaccgtcgcagggttcaagacgctgctgctggaggcccgtgatcgtattggtggccgctcctggagcagtaatattgacggttacccgtatgagatgggtggcacttgggttcattggcatcaaccgcacgtgtggcgtgaaatcacgcgttataaaatgcacaacgcgctgtctccatcatttaacttttcacgtggcgtgaatcacttccaactgcgtaccaatccgaccaccagtacgtacatgacgcacgaagcggaggatgaactgctgcgtagcgcattgcataaattcaccaatgtcgacggcactaatggccgtacagtgttgccgttcccacatgatatgttttatgtgccggaatttcgcaagtatgacgaaatgtcatattccgaacgcattgaccagatccgcgacgatctgtctttgaacgaacgctctagtttagaggctttcattttattatgtagcggtggcaccctggaaaactccagctttggtgaatttctgcattggtgggcaatgtcgggttacacgtatcagggctgtatggattgtttaatctcctataaatttaaggatggccagagtgcgttcgcgcgtcgcttctgggaagaagccgctggcactggccgtctgggctatgtctttggtactccggtgcgttctgtggtgaacgaacgcgacgcagtacgtgttaccgcacgtgacggtcgcgaattcgcagcgaaacgtttggtttgcacgattccgctgaacgtattgagttctgttcattttagcccaccactgtccccgcaacgcatggccgctgcgaacattggccatgttaaccagtgcgtcaaagtgcatgcggaagtcagtaacaaggatatgcgttcatggtcgggtatctcctatccgttcaacaaattagcctacgctatcggcgatggcacgaccccagcgggtaatacgcatattgtgtgccttgggggggcccataatcatatccagccggaagaggacgtggaagcaacgaagatggccgttgaaaacatgtcgcctgggaatatggatatcaaacgtctggtcttccacaactggtgcaaggatgaatttgccaaaggcgcgtggttcttcgcccctccacagctgctgtcaaagagcctggatgaactgcgctgtcgtcacggtaatgtcctgtttgcaaactccgattgggccttaggttggcgtggttttatcgatggtgctatcgaggagggcacccgcgcagcggttactgtaattgaggaactgcgtcctgcgcctgcggtgcgttcccacctg

SEQ ID NO: 734 - protein, 495 aa, synthetic construct
  REGION 1..495: note = Variant of monoamine oxidase
MTSRDGYQWTPETGLTQGVPSLGVISPPTNIEDTDKDGPWDVIVIGGGYCGLTATRDLTVAGFKTLLLEARDRIGGRSWSSNIDGYPYEMGGTWVHWHQPHVWREITRYKMHNALSPSFNFSRGVNHFQLRTNPTTSTYMTHEAEDELLRSALHKFTNVDGTNGRTVLPFPHDMFYVPEFRKYDEMSYSERIDQIRDDLSLNERSSLEAFILLCSGGTLENSSFGEFLHWWAMSGYTYQGCMDCLISYKFKDGQSAFARRFWEEAAGTGRLGYVFGTPVRSVVNERDAVRVTARDGREFAAKRLVCTIPLNVLSSVHFSPPLSPQRMAAANIGHVNQCVKVHAEVSNKDMRSWSGISYPFNKLAYAIGDGTTPAGNTHIVCLGGAHNHIQPEEDVEATKMAVENMSPGNMDIKRLVFHNWCKDEFAKGAWFFAPPQLLSKSLDELRCRHGNVLFANSDWALGWRGFIDGAIEEGTRAAVTVIEELRPAPAVRSHL

SEQ ID NO: 735 - DNA, 1485 bp, synthetic construct
  misc_feature 1..1485: note = Variant of monoamine oxidase
  source 1..1485: mol_type = other DNA
atgaccagccgcgacggctatcagtggaccccggaaacgggtctgacccagggcgtaccgtccctgggtgtcatttcgccgccgactaacatcgaagataccgataaggacgggccttgggatgtcattgtcattgggggcgggtattgtgggctgaccgcaacccgtgatttaaccgtcgcagggttcaagacgctgctgctggaggcccgtgatcgtattggtggccgctcctggagcagtaatattgacggttacccgtatgagatgggtggcacttgggttcattggcatcaaccgcacgtgtggcgtgaaatcacgcgttataaaatgcacaacgcgctgtctccatcatttaacttttcacgtggcgtgaatcacttccaactgcgtaccaatccgaccaccagtacgtacatgacgcacgaagcgggggatgaactgatgcgtagcgcattgcttaaattcaccaatgtcgacggcactaatggccgtacagtgttgccgttcccacatgatatgttttatgtgccggaatttcgcaagtatgacgaaatgtcatattccgaacgcattgaccagatccgcgacgaactgtctttgaacgaacgctctagtttagaggctttcattttattatgtagcggtggcaccctggaaaactccagctttggtgaatttctgcattggtgggcaatgtcgggttacacgtatcagggctgtatggattgtttaatgtcctataaatttaaggatggccagagtgcgttcgcgcgtcgcttctgggaagaagccgctggcactggccgtctgggctatgtctttggtactccggtgcgttctgtggtgaacgaacgcgacgcagtacgtgttaccgcacgtgacggtcgcgaattcgcagcgaaacgtttggtttgcacgattccgctgaacgtattgagttctgttcattttagcccaccactgtccccgcaacgcatggccgctgcgaacattggccatgttaaccagtgcgtcaaagtgcatgcggaagtcagttgcccagatatgcgttcatggtcgggtatctcctatccgttcaacaaattagcctacgctatcggcgatggcacgaccccagcgggtaatacgcatattgtgtgccttgggggggcccataatcatatccagccggaagaggacgtggaagcaacgaagatggccgttgaaaacatgtcgcctgggaatatggatatcaaacgtctggtcttccacaactggtgcaaggatgaatttgccaaaggcgcgtggttcttcgcccctccacagctgctgtcaaagagcctggatgaactgcgctgtcgtcacggtaatgtcctgtttgcaaactccgattgggccttaggttggcgtggttttatcgatggtgctatcgaggagggcacccgcgcagcggttactgtaattgaggaactgcgtcctgcgcctgcggtgcgttcccacctg

SEQ ID NO: 736 - protein, 495 aa, synthetic construct
  REGION 1..495: note = Variant of monoamine oxidase
MTSRDGYQWTPETGLTQGVPSLGVISPPTNIEDTDKDGPWDVIVIGGGYCGLTATRDLTVAGFKTLLLEARDRIGGRSWSSNIDGYPYEMGGTWVHWHQPHVWREITRYKMHNALSPSFNFSRGVNHFQLRTNPTTSTYMTHEAGDELMRSALLKFTNVDGTNGRTVLPFPHDMFYVPEFRKYDEMSYSERIDQIRDELSLNERSSLEAFILLCSGGTLENSSFGEFLHWWAMSGYTYQGCMDCLMSYKFKDGQSAFARRFWEEAAGTGRLGYVFGTPVRSVVNERDAVRVTARDGREFAAKRLVCTIPLNVLSSVHFSPPLSPQRMAAANIGHVNQCVKVHAEVSCPDMRSWSGISYPFNKLAYAIGDGTTPAGNTHIVCLGGAHNHIQPEEDVEATKMAVENMSPGNMDIKRLVFHNWCKDEFAKGAWFFAPPQLLSKSLDELRCRHGNVLFANSDWALGWRGFIDGAIEEGTRAAVTVIEELRPAPAVRSHL

SEQ ID NO: 737 - DNA, 1485 bp, synthetic construct
  misc_feature 1..1485: note = Variant of monoamine oxidase
  source 1..1485: mol_type = other DNA
atgaccagccgcgacggctatcagtggaccccggaaacgggtctgacccagggcgtaccgtccctgggtgtcatttcgccgccgactaacatcgaagataccgataaggacgggccttgggatgtcattgtcattgggggcgggtattgtgggctgaccgcaacccgtgatttaaccgtcgcagggttcaagacgctgctgctggaggcccgtgatcgtattggtggccgctcctggagcagtaatattgacggttacccgtatgagatgggtggcacttgggttcattggcatcaatctcacgtgtggcgtgaaatcacgcgttataaaatgcacaacgcgctgtctccatcatttaacttttcacgtggcgtgaatcacttccaactgcgtaccaatccgaccaccagtacgtacatgacgcacgaagcggaggatgaactgctgcgtagcgcattgcataaattcaccaatgtcgacggcactaatggccgtacagtgttgccgttcccacatgatatgttttatgtgccggaatttcgcaagtatcgcgaaatgtcatattccgaacgcattgaccagatccgcgacgaactgtctttgaacgaacgctctagtttagaggctttcattttattatgtagcggtggcaccctggaaaactccagctttggtgaatttctgcattggtgggcaatgtcgggttacacgtaccagggctgtatggattgtttaatctcctataaatttaaggatggccagagtgcgttcgcgcgtcgcttctgggaagaagccgctggcactggccgtctgggctatgtctttggttgtccggtgcgttctgtggtgaacgaacgcgacgcagtacgtgttaccgcacgtgacggtcgcgaattcgcagcgaaacgtttggtttgcacgattccgctgaacgtattgagttctgttcattttagcccaccactgtccccgcaacgcatggccgctgcgaacatcggccatgttaaccagtgcgtcaaagtgcatgcggaagtcagttgtccggatatgcgttcatggtcgggtatctcctatccgttcaacaaattagcctacgctatcggcgatggcacgaccccagcgggtaatacgcatattgtgtgccttgggggggcccataatcatatccagccggaagaggacgtggaagcaacgaagatggccgttgaaaacatgtcgcctgggaatatggatatcaaacgtctggtcttccacaactggtgcaaggatgaatttgccaaaggcgcgtggttcttcgcccctccacagctgctgtcaaagagcctggatgaactgcgctgccgtcacggtaatgtcctgtttgcaaactccgattgggccttaggttggcgtggttttatcgatggtgctatcgaggagggcacccgcgcagcggttactgtaattgaggaactgcgtcctgcgcctgcggtgcgttcccacctg

SEQ ID NO: 738 - protein, 495 aa, synthetic construct; identical to SEQ ID NO: 50
  REGION 1..495: note = Variant of monoamine oxidase

SEQ ID NO: 739 - DNA, 1485 bp, synthetic construct
  misc_feature 1..1485: note = Variant of monoamine oxidase
  source 1..1485: mol_type = other DNA
atgaccagccgcgacggctatcagtggaccccggaaacgggtctgacccagggcgtaccgtccctgggtgtcatttcgccgccgactaacatcgaagataccgataaggacgggccttgggatgtcattgtcattgggggcgggtattgtgggctgaccgcaacccgtgatttaaccgtcgcagggttcaagacgctgctgctggaggcccgtgatcgtattggtggccgctcctggagcagtaatattgacggttacccgtatgagatgggtggcacttgggttcattggcatcaaccgcacgtgtggcgtgaaatcacgcgttataaaatgcacaacgcgctgtctccatcatttaacttttcacgtggcgtgaatcacttccaactgcgtaccaatccgaccaccagtacgtacatgacgcacgaagcggaggatgaactgatgcgtagcgcattgcataaattcaccaatgtcgacggcactaatggccgtacagtgttgccgttcccacatgatatgttttatgtgccggaatttcgcaagtatgacgaaatgtcatattccgaacgcattgaccagatccgcgacgaactgtctttgaacgaacgctctagtttagaggctttcattttattatgtagcggtggcaccctggaaaactccagctttggtgaatttctgcattggtgggcaatgtcgggttacacgtatcagggctgtatggattgtttaatgtcctataaatttaaggatggccagagtgcgttcgcgcgtcgcttctgggaagaagccgctggcactggccgtctgggctatgtctttggttgtccggtgcgttctgtggtgaacgaacgcgacgcagtacgtgttaccgcacgtgacggtcgcgaattcgcagcgaaacgtttggtttgcacgattccgctgaacgtattgagttctgttcattttagcccaccactgtccccgcaacgcatggccgctgcgaacattggccatgttaaccagtgcgtcaaagtgcatgcggaagtcagttgcccagatatgcgttcatggtcgggtatctcctatccgttcaacaaattagcctacgctatcggcgatggcacgaccccagcgggtaatacgcatattgtgtgccttgggggggcccataatcatatccagccggaagaggacgtggaagcaacgaagatggccgttgaaaacatgtcgcctgggaatatggatatcaaacgtctggtcttccacaactggtgcaaggatgaatttgccaaaggcgcgtggttcttcgcccctccacagctgctgtcaaagagcctggatgaactgcgcgcacgtcacggtaatgtcctgtttgcaaactccgattgggccttaggttggcgtggttttatcgatggtgctatcgaggagggcacccgcgcagcggttactgtaattgaggaactgcgtcctgcgcctgcggtgcgttcccacctg

SEQ ID NO: 740 - protein, 495 aa, synthetic construct
  REGION 1..495: note = Variant of monoamine oxidase
MTSRDGYQWTPETGLTQGVPSLGVISPPTNIEDTDKDGPWDVIVIGGGYCGLTATRDLTVAGFKTLLLEARDRIGGRSWSSNIDGYPYEMGGTWVHWHQPHVWREITRYKMHNALSPSFNFSRGVNHFQLRTNPTTSTYMTHEAEDELMRSALHKFTNVDGTNGRTVLPFPHDMFYVPEFRKYDEMSYSERIDQIRDELSLNERSSLEAFILLCSGGTLENSSFGEFLHWWAMSGYTYQGCMDCLMSYKFKDGQSAFARRFWEEAAGTGRLGYVFGCPVRSVVNERDAVRVTARDGREFAAKRLVCTIPLNVLSSVHFSPPLSPQRMAAANIGHVNQCVKVHAEVSCPDMRSWSGISYPFNKLAYAIGDGTTPAGNTHIVCLGGAHNHIQPEEDVEATKMAVENMSPGNMDIKRLVFHNWCKDEFAKGAWFFAPPQLLSKSLDELRARHGNVLFANSDWALGWRGFIDGAIEEGTRAAVTVIEELRPAPAVRSHL

SEQ ID NO: 741 - DNA, 1485 bp, synthetic construct
  misc_feature 1..1485: note = Variant of monoamine oxidase
  source 1..1485: mol_type = other DNA
atgaccagccgcgacggctatcagtggaccccggaaacgggtctgacccagggcgtaccgtccctgggtgtcatttcgccgccgactaacatcgaagataccgataaggacgggccttgggatgtcattgtcattgggggcgggtattgtgggctgaccgcaacccgtgatttaaccgtcgcagggttcaagacgctgctgctggaggcccgtgatcgtattggtggccgctcctggagcagtaatattgacggttacccgtatgagatgggtggcacttgggttcattggcatcaatcgcacgtgtggcgtgaaatcacgcgttataaaatgcacaacgcgctgtctccatcatttaacttttcacgtggcgtgaatcacttccaactgcgtaccaatccgaccaccagtacgtacatgacgcacgaagcgtcggatgaactgatgcgtagcgcattgcataaattcaccaatgtcgacggcactaatggccgtacagtgttgccgttcccacatgatatgttttatgtgccggaatttcgcaagtatgacgaaatgtcatattccgaacgcattgaccagatccgcgacgatctgtctttgaacgaacgctctagtttagaggctttcattttattatgtagcggtggcaccctggaaaactccagctttggtgaatttctgcattggtgggcaatgtcgggttacacgtatcagggctgtattgattgtttaatttcctataaatttaaggatggccagagtgcgttcgcgcgtcgcttctgggaagaagccgctggcactggccgtctgggctatgtctttggtactccggtgcgttctgtggtgaacgaacgcgacgcagtacgtgttaccgcacgtgacggtcgcgaattcgcagcgaaacgtttggtttgcacgattccgctgaacgtattgagttctgttcattttagcccaccactgtccccgcaacgcatggccgctgcgaacattggccatgttaaccagtgcgtcaaagtgcatgcggaagtcagtgacccagatatgcgttcatggtcgggtatctcctatccgttcaacaaattagcctacgctatcggcgatggcacgaccccagcgggtaatacgcatattgtgtgccttgggggggcccataatcatatccagccggaagaggacgtggaagcaacgaagatggccgttgaaaacatgtcgcctgggaatatggatatcaaacgtctggtcttccacaactggtgcaaggatgaatttgccaaaggcgcgtggttcttcgcccctccacagctgctgtcaaagagcctggatgaactgcgctgtcgtcacggtaatgtcctgtttgcaaactccgattgggccttaggttggcgtggttttatcgatggtgctatcgaggagggcacccgcgcagcggttactgtaattgaggaactgcgtcctgcgcctgcggtgcgttcccacctg

SEQ ID NO: 742 - protein, 495 aa, synthetic construct
  REGION 1..495: note = Variant of monoamine oxidase
MTSRDGYQWTPETGLTQGVPSLGVISPPTNIEDTDKDGPWDVIVIGGGYCGLTATRDLTVAGFKTLLLEARDRIGGRSWSSNIDGYPYEMGGTWVHWHQSHVWREITRYKMHNALSPSFNFSRGVNHFQLRTNPTTSTYMTHEASDELMRSALHKFTNVDGTNGRTVLPFPHDMFYVPEFRKYDEMSYSERIDQIRDDLSLNERSSLEAFILLCSGGTLENSSFGEFLHWWAMSGYTYQGCIDCLISYKFKDGQSAFARRFWEEAAGTGRLGYVFGTPVRSVVNERDAVRVTARDGREFAAKRLVCTIPLNVLSSVHFSPPLSPQRMAAANIGHVNQCVKVHAEVSDPDMRSWSGISYPFNKLAYAIGDGTTPAGNTHIVCLGGAHNHIQPEEDVEATKMAVENMSPGNMDIKRLVFHNWCKDEFAKGAWFFAPPQLLSKSLDELRCRHGNVLFANSDWALGWRGFIDGAIEEGTRAAVTVIEELRPAPAVRSHL

SEQ ID NO: 743 - DNA, 1485 bp, synthetic construct
  misc_feature 1..1485: note = Variant of monoamine oxidase
  source 1..1485: mol_type = other DNA
atgaccagccgcgacggctatcagtggaccccggaaacgggtctgacccagggcgtaccgtccctgggtgtcatttcgccgccgactaacatcgaagataccgataaggacgggccttgggatgtcattgtcattgggggcgggtattgtgggctgaccgcaacccgtgatttaaccgtcgcagggttcaagacgctgctgctggaggcccgtgatcgtattggtggccgctcctggagcagtcgcattgacggttacctgtatgagatgggtggcacttgggttcattggcatcaatctcacgtgtggcgtgaaatcacgcgttataaaatgcacaacgcgctgtctccgtcatttaacttttcacgtggcgtgaatcacttccaactgcgtaccaatccgaccaccagtacgtacatgacgcacgaagcggaggatgaactgctgcgtagcgcattgcataaattcaccaatgtcgacggcactaatggccgtacagtgttgccgttcccacatgatatgttttatgtgccggaatttcgcaagtatgacgaaatgtcatattccgaacgcattgaccagatccgcgacgaactgtctttgaacgaacgctctagtttagaggctttcattttattatgtagcggtggcaccctggaaaactccagctttggtgaatttctgcattggtgggcaatgtcgggttacacgtatcagggctgtatggattgtttaatctcctataaatttaaggatggccagagtgcgttcgcgcgtcgcttctgggaagaagccgctggcactggccgtctgggctatgtctttggttgtccggtgcgttctgtggtgaacgaacgcgacgcagtacgtgttaccgcacgtgacggtcgcgaattcgcagcgaaacgtttggtttgcacgattccgctgaacgtattgagttctgttcattttagcccaccactgtccccgcaacgcatggccgctgcgaacattggccatgttaaccagtgcgtcaaagtgcatgcggaagtcagttgtccggatatgcgttcatggtcgggtatctcctatccgttcaacaaattagcctacgctatcggcgatggcacgaccccagcgggtaatacgcatattgtgtgccttgggggggcccataatcatatccagccggaagaggacgtggaagcaacgaagatggccgttgaaaacatgtcgcctgggaatatggatatcaaacgtctggtcttccacaactggtgcaaggatgaatttgccaaaggcgcgtggttcttcgcccctccacagctgctgtcaaagagcctggatgaactgcgctgccgtcacggtaatgtcctgtttgcaaactccgattgggccttaggttggcgtggttttatcgatggtgctatcgaggagggcacccgcgcagcggttactgtaattgaggaactgcgtcctgcgcctgcggtgcgttcccacctg

SEQ ID NO: 744 - protein, 495 aa, synthetic construct
  REGION 1..495: note = Variant of monoamine oxidase
MTSRDGYQWTPETGLTQGVPSLGVISPPTNIEDTDKDGPWDVIVIGGGYCGLTATRDLTVAGFKTLLLEARDRIGGRSWSSRIDGYLYEMGGTWVHWHQSHVWREITRYKMHNALSPSFNFSRGVNHFQLRTNPTTSTYMTHEAEDELLRSALHKFTNVDGTNGRTVLPFPHDMFYVPEFRKYDEMSYSERIDQIRDELSLNERSSLEAFILLCSGGTLENSSFGEFLHWWAMSGYTYQGCMDCLISYKFKDGQSAFARRFWEEAAGTGRLGYVFGCPVRSVVNERDAVRVTARDGREFAAKRLVCTIPLNVLSSVHFSPPLSPQRMAAANIGHVNQCVKVHAEVSCPDMRSWSGISYPFNKLAYAIGDGTTPAGNTHIVCLGGAHNHIQPEEDVEATKMAVENMSPGNMDIKRLVFHNWCKDEFAKGAWFFAPPQLLSKSLDELRCRHGNVLFANSDWALGWRGFIDGAIEEGTRAAVTVIEELRPAPAVRSHL

SEQ ID NO: 745 - DNA, 1485 bp, synthetic construct
  misc_feature 1..1485: note = Variant of monoamine oxidase
  source 1..1485: mol_type = other DNA
atgaccagccgcgacggctatcagtggaccccggaaacgggtctgacccagggcgtaccgtccctgggtgtcatttcgccgccgactaacatcgaagataccgataaggacgggccttgggatgtcattgtcattgggggcgggtattgtgggctgaccgcaacccgtgatttaaccgtcgcagggttcaagacgctgctgctggaggcccgtgatcgtattggtggccgctcctggagcagtaatattgacggttacccgtatgagatgggtggcacttgggttcattggcatcaatctcacgtgtggcgtgaaatcacgcgttataaaatgcacaacgcgctgtctaaatcatttaacttttcacgtggcgtgaatcacttccaactgcgtaccaatccgaccaccagtacgtacatgacgcacgaagcggaggatgaactgctgcgtagcgcattgcataaattcaccaatgtcgacggcactaatggccgtacagtgttgccgttcccacatgatatgttttatgtgccggaatttcgcaagtatgacgaaatgtcatattccgaacgcattgaccagatccgcgacgaactgtctttgaacgaacgctctagtttagaggctttcattttattatgtagcggtggcaccctggaaaactccagctttggtgaatttctgcattggtgggcaatgtcgggttacacgtatcagggctgtatggattgtttaatctcctataaatttaaggatggccagagtgcgttcgcgcgtagcttctgggaagaagccgctggcactggccgtctgggctatgtctttggttgtccggtgcgttctgtggtgaacgaacgcgacgcagtacgtgttaccgcacgtgacggtcgcgaattcgcagcgaaacgtttggtttgcacgattccgctgaacgtattgagttctgttcattttagcccaccactgtccccgcaacgcatggccgctgcgaacattggccatgttaaccagtgcgtcaaagtgcatgcggaagtcagttgtccggatatgcgttcatggtcgggtatctcctatccgttcaacaaattagcctacgctatcggcgatggcacgaccccagcgggtaatacgcatattgtgtgccttgggggggcccataatcatatccagccggaagaggacgtggaagcaacgaagatggccgttgaaaacatgtcgcctgggaatatggatatcaaacgtctggtcttccacaactggtgcaaggatgaatttgccaaaggcgcgtggttcttcgcccctccacagctgctgtcaaagagcctggatgaactgcgctgccgtcacggtaatgtcctgtttgcaaactccgattgggccttaggttggcgtggttttatcgatggtgctatcgaggagggcacccgcgcagcggttactgtaattgaggaactgcgtcctgcgcctgcggtgcgttcccacctg

SEQ ID NO: 746 - protein, 495 aa, synthetic construct
  REGION 1..495: note = Variant of monoamine oxidase
MTSRDGYQWTPETGLTQGVPSLGVISPPTNIEDTDKDGPWDVIVIGGGYCGLTATRDLTVAGFKTLLLEARDRIGGRSWSSNIDGYPYEMGGTWVHWHQSHVWREITRYKMHNALSKSFNFSRGVNHFQLRTNPTTSTYMTHEAEDELLRSALHKFTNVDGTNGRTVLPFPHDMFYVPEFRKYDEMSYSERIDQIRDELSLNERSSLEAFILLCSGGTLENSSFGEFLHWWAMSGYTYQGCMDCLISYKFKDGQSAFARSFWEEAAGTGRLGYVFGCPVRSVVNERDAVRVTARDGREFAAKRLVCTIPLNVLSSVHFSPPLSPQRMAAANIGHVNQCVKVHAEVSCPDMRSWSGISYPFNKLAYAIGDGTTPAGNTHIVCLGGAHNHIQPEEDVEATKMAVENMSPGNMDIKRLVFHNWCKDEFAKGAWFFAPPQLLSKSLDELRCRHGNVLFANSDWALGWRGFIDGAIEEGTRAAVTVIEELRPAPAVRSHL

SEQ ID NO: 747 - DNA, 1485 bp, synthetic construct
  misc_feature 1..1485: note = Variant of monoamine oxidase
  source 1..1485: mol_type = other DNA
atgaccagccgcgacggctatcagtggaccccggaaacgggtctgacccagggcgtaccgtccctgggtgtcatttcgccgccgactaacatcgaagataccgataaggacgggccttgggatgtcattgtcattgggggcgggtattgtgggctgaccgcaacccgtgatttaaccgtcgcagggttcaagacgctgctgctggaggcccgtgatcgtattggtggccgctcctggagcagtaatattgacggttacccgtatgagatgggtggcacttgggttcattggcatcaatcgcacgtgtggcgtgaaatcacgcgttataaaatgcacaacgcgctgtctccatcatttaacttttcacgtggcgtgaatcacttccaactgcgtaccaatccgaccaccagtacgtacatgacgcacgaagcggaggatgaactgatgcgtagcgcattgcataaattcaccaatgtcgacggcactaatggccgtacagtgttgccgttcccacatgatatgttttatgtgccggaatttcgcaagtatgacgaaatgtcatattccgaacgcattgaccagatccgcgacgatctgtctttgaacgaacgctctagtttagaggctttcattttattatgtagcggtggcaccctggaaaactccagctttggtgaatttctgcattggtgggcaatgtcgggttacacgtatcagggctgtatggattgtttaatctcctataaatttaaggatggccagagtgcgttcgcgcgtcgcttctgggaagaagccgctggcactggccgtctgggctatgtctttggttgcccggtgcgttctgtggtgaacgaacgcgacgcagtacgtgttaccgcacgtgacggtcgcgaattcgcagcgaaacgtttggtttgcacgattccgctgaacgtattgagttctgttcattttagcccaccactgtccccgcaacgcatggccgctgcgaacattggccatgttaaccagtgcgtcaaagtgcatgcggaagtcagttgcaaggatatgcgttcatggtcgggtatctcctatccgttcaacaaattagcctacgctatcggcgatggcacgaccccagcgggtaatacgcatattgtgtgccttgggggggcccataatcatatccagccggaagaggacgtggaagcaacgaagatggccgttgaaaacatgtcgcctgggaatatggatatcaaacgtctggtcttccacaactggtgcaaggatgaatttgccaaaggcgcgtggttcttcgcccctccacagctgctgtcaaagagcctggatgaactgcgctgtcgtcacggtaatgtcctgtttgcaaactccgattgggccttaggttggcgtggttttatcgatggtgctatcgaggagggcacccgcgcagcggttactgtaattgaggaactgcgtcctgcgcctgcggtgcgttcccacctg

SEQ ID NO: 748 - protein, 495 aa, synthetic construct
  REGION 1..495: note = Variant of monoamine oxidase
MTSRDGYQWTPETGLTQGVPSLGVISPPTNIEDTDKDGPWDVIVIGGGYCGLTATRDLTVAGFKTLLLEARDRIGGRSWSSNIDGYPYEMGGTWVHWHQSHVWREITRYKMHNALSPSFNFSRGVNHFQLRTNPTTSTYMTHEAEDELMRSALHKFTNVDGTNGRTVLPFPHDMFYVPEFRKYDEMSYSERIDQIRDDLSLNERSSLEAFILLCSGGTLENSSFGEFLHWWAMSGYTYQGCMDCLISYKFKDGQSAFARRFWEEAAGTGRLGYVFGCPVRSVVNERDAVRVTARDGREFAAKRLVCTIPLNVLSSVHFSPPLSPQRMAAANIGHVNQCVKVHAEVSCKDMRSWSGISYPFNKLAYAIGDGTTPAGNTHIVCLGGAHNHIQPEEDVEATKMAVENMSPGNMDIKRLVFHNWCKDEFAKGAWFFAPPQLLSKSLDELRCRHGNVLFANSDWALGWRGFIDGAIEEGTRAAVTVIEELRPAPAVRSHL

SEQ ID NO: 749 - DNA, 1485 bp, synthetic construct
  misc_feature 1..1485: note = Variant of monoamine oxidase
  source 1..1485: mol_type = other DNA
atgaccagccgcgacggctatcagtggaccccggaaacgggtctgacccagggcgtaccgtccctgggtgtcatttcgccgccgactaacatcgaagataccgataaggacgggccttgggatgtcattgtcattgggggcgggtattgtgggctgaccgcaacccgtgatttaaccgtcgcagggttcaagacgctgctgctggaggcccgtgatcgtattggtggccgctcctggagcagtaatattgacggttacccgtatgagatgggtggcacttgggttcattggcatcaaccgcacgtgtggcgtgaaatcacgcgttataaaatgcacaacgcgctgtctccatcatttaacttttcacgtggcgtgaatcacttccaactgcgtaccaatccgaccaccagtacgtacatgacgcacgaagcggaggatgaactgctgcgtagcgcattgcataaattcaccaatgtcgacggcactaatggccgtacagtgttgccgttcccacatgatatgttttatgtgccggaatttcgcaagtatgacgaaatgtcatattccgaacgcattgaccagatccgcgacgaactgtctttgaacgaacgctctagtttagaggctttcattttattatgtagcggtggcaccctggaaaactccagctttggtgaatttctgcattggtgggcaatgtcgggttacacgtatcagggctgtatggattgtttaatctcctataaatttaaggatggccagagtgcgttcgcgcgtcgcttctgggaagaagccgctggcactggccgtctgggctatgtctttggtactccggtgcgttctgtggtgaacgaacgcgacgcagtacgtgttaccgcacgtgacggtcgcgaattcgcagcgaaacgtttggtttgcacgattccgctgaacgtattgagttctgttcattttagcccaccactgtccccgcaacgcatggccgctgcgaacattggccatgttaaccagtgcgtcaaagtgcatgcggaagtcagtgacccagatatgcgttcatggtcgggtatctcctatccgttcaacaaattagcctacgctatcggcgatggcacgaccccagcgggtaatacgcatattgtgtgccttgggggggcccataatcatatccagccggaagaggacgtggaagcaacgaagatggccgttgaaaacatgtcgcctgggaatatggatatcaaacgtctggtcttccacaactggtgcaaggatgaatttgccaaaggcgcgtggttcttcgcccctccacagctgctgtcaaagagcctggatgaacgtcgcgcacgtcacggtaatgtcctgtttgcaaactccgattgggccttaggttggcgtggttttatcgatggtgctatcgaggagggcacccgcgcagcggttactgtaattgaggaactgcgtcctgcgcctgcggtgcgttcccacctg

SEQ ID NO: 750 - protein, 495 aa, synthetic construct
  REGION 1..495: note = Variant of monoamine oxidase
MTSRDGYQWTPETGLTQGVPSLGVISPPTNIEDTDKDGPWDVIVIGGGYCGLTATRDLTVAGFKTLLLEARDRIGGRSWSSNIDGYPYEMGGTWVHWHQPHVWREITRYKMHNALSPSFNFSRGVNHFQLRTNPTTSTYMTHEAEDELLRSALHKFTNVDGTNGRTVLPFPHDMFYVPEFRKYDEMSYSERIDQIRDELSLNERSSLEAFILLCSGGTLENSSFGEFLHWWAMSGYTYQGCMDCLISYKFKDGQSAFARRFWEEAAGTGRLGYVFGTPVRSVVNERDAVRVTARDGREFAAKRLVCTIPLNVLSSVHFSPPLSPQRMAAANIGHVNQCVKVHAEVSDPDMRSWSGISYPFNKLAYAIGDGTTPAGNTHIVCLGGAHNHIQPEEDVEATKMAVENMSPGNMDIKRLVFHNWCKDEFAKGAWFFAPPQLLSKSLDERRARHGNVLFANSDWALGWRGFIDGAIEEGTRAAVTVIEELRPAPAVRSHL

SEQ ID NO: 751 - DNA, 1485 bp, synthetic construct
  misc_feature 1..1485: note = Variant of monoamine oxidase
  source 1..1485: mol_type = other DNA
atgaccagccgcgacggctatcagtggaccccggaaacgggtctgacccagggcgtaccgtccctgggtgtcatttcgccgccgactaacatcgaagataccgataaggacgggccttgggatgtcattgtcattgggggcgggtattgtgggctgaccgcaacccgtgatttaaccgtcgcagggttcaagacgctgctgctggaggcccgtgatcgtattggtggccgctcctggagcagtaatattgacggttacccgtatgagatgggtggcacttgggttcattggcatcaatcgcacgtgtggcgtgaaatcacgcgttataaaatgcacaacgcgctgtctccatcatttaacttttcacgtggcgtgaatcacttccaactgcgtaccaatccgaccaccagtacgtacatgacgcacgaagcgtcggatgaactgctgcgtagcgcattgcataaattcaccaatgtcgacggcactaatggccgtacagtgttgccgttcccacatgatatgttttatgtgccggaatttcgcaagtatgacgaaatgtcatattccgaacgcattgaccagatccgcgacgaactgtctttgaacgaacgctctagtttagaggctttcattttattatgtagcggtggcaccctggaaaactccagctttggtgaatttctgcattggtgggcaatgtcgggttacacgtatcagggctgtatggattgtttaatctcctataaatttaaggatggccagagtgcgttcgcgcgtcgcttctgggaagaagccgctggcactggccgtctgggctatgtctttggtactccggtgcgttctgtggtgaacgaacgcgacgcagtacgtgttaccgcacgtgacggtcgcgaattcgcagcgaaacgtttggtttgcacgattccgctgaacgtattgagttctgttcattttagcccaccactgtccccgcaacgcatggccgctgcgaacattggccatgttaaccagtgcgtcaaagtgcatgcggaagtcagttgcaaggatatgcgttcatggtcgggtatctcctatccgttcaacaaattagcctacgctatcggcgatggcacgaccccagcgggtaatacgcatattgtgtgccttgggggggcccataatcatatccagccggaagaggacgtggaagcaacgaagatggccgttgaaaacatgtcgcctgggaatatggatatcaaacgtctggtcttccacaactggtgcaaggatgaatttgccaaaggcgcgtggttcttcgcccctccacagctgctgtcaaagagcctggatgaactgcgcgcacgtcacggtaatgtcctgtttgcaaactccgattgggccttaggttggcgtggttttatcgatggtgctatcgaggagggcacccgcgcagcggttactgtaattgaggaactgcgtcctgcgcctgcggtgcgttcccacctg

SEQ ID NO: 752 - protein, 495 aa, synthetic construct
  REGION 1..495: note = Variant of monoamine oxidase
MTSRDGYQWTPETGLTQGVPSLGVISPPTNIEDTDKDGPWDVIVIGGGYCGLTATRDLTVAGFKTLLLEARDRIGGRSWSSNIDGYPYEMGGTWVHWHQSHVWREITRYKMHNALSPSFNFSRGVNHFQLRTNPTTSTYMTHEASDELLRSALHKFTNVDGTNGRTVLPFPHDMFYVPEFRKYDEMSYSERIDQIRDELSLNERSSLEAFILLCSGGTLENSSFGEFLHWWAMSGYTYQGCMDCLISYKFKDGQSAFARRFWEEAAGTGRLGYVFGTPVRSVVNERDAVRVTARDGREFAAKRLVCTIPLNVLSSVHFSPPLSPQRMAAANIGHVNQCVKVHAEVSCKDMRSWSGISYPFNKLAYAIGDGTTPAGNTHIVCLGGAHNHIQPEEDVEATKMAVENMSPGNMDIKRLVFHNWCKDEFAKGAWFFAPPQLLSKSLDELRARHGNVLFANSDWALGWRGFIDGAIEEGTRAAVTVIEELRPAPAVRSHL

SEQ ID NO: 753 - DNA, 1485 bp, synthetic construct
  misc_feature 1..1485: note = Variant of monoamine oxidase
  source 1..1485: mol_type = other DNA
atgaccagccgcgacggctatcagtggaccccggaaacgggtctgacccagggcgtaccgtccctgggtgtcatttcgccgccgactaacatcgaagataccgataaggacgggccttgggatgtcattgtcattgggggcgggtattgtgggctgaccgcaacccgtgatttaaccgtcgcagggttcaagacgctgctgctggaggcccgtgatcgtattggtggccgctcctggagcagtaatattgacggttacccgtatgagatgggtggcggctgggttcattggcatcaatctcacgtgtggcgtgaaatcacgcgttataaaatgcacaacgcgctgtctccatcatttaacttttcacgtggcgtgaatcacttccaactgcgtaccaatccgaccaccagtacgtacatgacgcacgaagcggaggatgaactgctgcgtagcgcattgcataaattcaccaatgtcgacggcactaatggccgtacagtgttgccgttcccacatgatatgttttatgtgccggaatttcgcaagtatcgcgaaatgtcatattccgaacgcattgaccagatccgcgacgaactgtctttgaacgaacgctctagtttagaggctttcattttattatgtagcggtggcaccctggaaaactccagctttggtgaatttctgcattggtgggcaatgtcgggttacacgtaccagggctgtatggattgtttaatctcctataaatttaaggatggccagagtgcgttcgcgcgtcgcttctgggaagaagccgctggcactggccgtctgggctatgtctttggttgtccggtgcgttctgtggtgaacgaacgcgacgcagtacgtgttaccgcacgtgacggtcgcgaattcgcagcgaaacgtttggtttgcacgattccgctgaacgtattgagttctgttcattttagcccaccactgtccccgcaacgcatggccgctgcgaacattggccatgttaaccagtgcgtcaaagtgcatgcggaagtcagttgtccggatatgcgttcatggtcgggtatctcctatccgttcaacaaattagcctacgctatcggcgatggcacgaccccagcgggtaatacgcatattgtgtgccttgggggggcccataatcatatccagccggaagaggacgtggaagcaacgaagatggccgttgaaaacatgtcgcctgggaatatggatatcaaacgtctggtcttccacaactggtgcaaggatgaatttgccaaaggcgggtggttcttcgcccctccacagctgctgtcaaagagcctggatgaactgcgctgccgtcacggtaatgtcctgtttgcaaactccgattgggccttaggttggcgtggttttatcgatggtgctatcgaggagggcacccgcgcagcggttactgtaattgaggaactgcgtcctgcgcctgcggtgcgttcccacctg

SEQ ID NO: 754 - protein, 495 aa, synthetic construct
  REGION 1..495: note = Variant of monoamine oxidase
MTSRDGYQWTPETGLTQGVPSLGVISPPTNIEDTDKDGPWDVIVIGGGYCGLTATRDLTVAGFKTLLLEARDRIGGRSWSSNIDGYPYEMGGGWVHWHQSHVWREITRYKMHNALSPSFNFSRGVNHFQLRTNPTTSTYMTHEAEDELLRSALHKFTNVDGTNGRTVLPFPHDMFYVPEFRKYREMSYSERIDQIRDELSLNERSSLEAFILLCSGGTLENSSFGEFLHWWAMSGYTYQGCMDCLISYKFKDGQSAFARRFWEEAAGTGRLGYVFGCPVRSVVNERDAVRVTARDGREFAAKRLVCTIPLNVLSSVHFSPPLSPQRMAAANIGHVNQCVKVHAEVSCPDMRSWSGISYPFNKLAYAIGDGTTPAGNTHIVCLGGAHNHIQPEEDVEATKMAVENMSPGNMDIKRLVFHNWCKDEFAKGGWFFAPPQLLSKSLDELRCRHGNVLFANSDWALGWRGFIDGAIEEGTRAAVTVIEELRPAPAVRSHL

SEQ ID NO: 755 - DNA, 1485 bp, synthetic construct
  misc_feature 1..1485: note = Variant of monoamine oxidase
  source 1..1485: mol_type = other DNA
atgaccagccgcgacggctatcagtggaccccggaaacgggtctgacccagggcgtaccgtccctgggtgtcatttcgccgccgactaacatcgaagataccgataaggacgggccttgggatgtcattgtcattgggggcgggtattgtgggctgaccgcaacccgtgatttaaccgtcgcagggttcaagacgctgctgctggaggcccgtgatcgtattggtggccgctcctggagcagttttattgacggttacctgtatgagatgggtggcacttgggttcattggcatcaatctcacgtgtggcgtgaaatcacgcgttataaaatgcacggcgcgctgtctaaatcatttaacttttcacgtggcgtgaatcacttccaactgcgtaccaatccgaccaccagtacgtacatgacgcacgaagcggaggatgaactgctgcgtagcgcattgcataaattcaccaatgtcgacggcactaatggccgtacagtgttgccgttcccacatgatatgttttatgtgccggaatttcgcaagtatgacgaaatgtcatattccgaacgcattgaccagatccgcgacgaactgtctttgaacgaacgctctagtttagaggctttcattttattatgtagcggtggcacctcggaaaactccagctttggtgaatttctgcattggtgggcaatgtcgggttacacgtatcagggctgtatggattgtttaatctcctataaatttaaggatggccagagtgcgttcgcgcgtcgcttctgggaagaagccgctggcactggccgtctgggctatgtctttggttgtccggtgcgttctgtggtgaacgaacgcgacgcagtacgtgttaccgcacgtgacggtcgcgaattcgcagcgaaacgtttggtttgcacgattccgctgaacgtattgagttctgttcattttagcccaccactgtccccgcaacgcatggccgctgcgaacattggccatgttaaccagtgcgtcaaagtgcatgcggaagtcagttgtccggatatgcgttcatggtcgggtatctcctatccgttcaacaaattagcctacgctatcggcgatggcacgaccccagcgggtaatacgcatattgtgtgccttgggggggcccataatcatatccagccggaagaggacgtggaagcaacgaagatggccgttgaaaacatgtcgcctgggaatatggatatcaaacgtctggtcttcgggaactggtgcaaggatgaatttgccaaaggcgcgtggttcttcgcccctccacagctgctgtcaaagagcctggatgaactgcgctgccgtcacggtaatgtcctgtttgcaaactccgattgggccttaggttggcgtggttttatcgatggtgctatcgaggagggcacccgcgcagcggttactgtaattgaggaactgcgtcctgcgcctgcggtgcgttcccacctg

SEQ ID NO: 756 - protein, 495 aa, synthetic construct
  REGION 1..495: note = Variant of monoamine oxidase
MTSRDGYQWTPETGLTQGVPSLGVISPPTNIEDTDKDGPWDVIVIGGGYCGLTATRDLTVAGFKTLLLEARDRIGGRSWSSFIDGYLYEMGGTWVHWHQSHVWREITRYKMHGALSKSFNFSRGVNHFQLRTNPTTSTYMTHEAEDELLRSALHKFTNVDGTNGRTVLPFPHDMFYVPEFRKYDEMSYSERIDQIRDELSLNERSSLEAFILLCSGGTSENSSFGEFLHWWAMSGYTYQGCMDCLISYKFKDGQSAFARRFWEEAAGTGRLGYVFGCPVRSVVNERDAVRVTARDGREFAAKRLVCTIPLNVLSSVHFSPPLSPQRMAAANIGHVNQCVKVHAEVSCPDMRSWSGISYPFNKLAYAIGDGTTPAGNTHIVCLGGAHNHIQPEEDVEATKMAVENMSPGNMDIKRLVFGNWCKDEFAKGAWFFAPPQLLSKSLDELRCRHGNVLFANSDWALGWRGFIDGAIEEGTRAAVTVIEELRPAPAVRSHL

SEQ ID NO: 757 - DNA, 1485 bp, synthetic construct
  misc_feature 1..1485: note = Variant of monoamine oxidase
  source 1..1485: mol_type = other DNA
atgaccagccgcgacggctatcagtggaccccggaaacgggtctgacccagggcgtaccgtccctgggtgtcatttcgccgccgactaacatcgaagataccgataaggacgggccttgggatgtcattgtcattgggggcgggtattgtgggctgaccgcaacccgtgatttaaccgtcgcagggttcaagacgctgctgctggaggcccgtgatcgtattggtggccgctcctggagcagtaatattgacggttacccgtatgagatgggtggcacttgggttcattggcatcaatcgcacgtgtggcgtgaaatcacgcgttataaaatgcacaacgcgctgtctccatcatttaacttttcacgtggcgtgaatcacttccaactgcgtaccaatccgaccaccagtacgtacatgacgcacgaagcggaggctgaactgctgcgtagcgcattgcataaattcaccaatgtcgacggcactaatggccgtacagtgttgccgttcccacatgatatgttttatgtgccggaatttcgcaagtatgacgaaatgtcatattccgaacgcattgaccagatccgcgacgaactgtctttgaacgaacgctctagtttagaggctttcattttattatgtagcggtggcaccctggaaaactccagctttggtgaatttctgcattggtgggcaatgtcgggttacacgtatcagggctgtatggattgtttaatctcctataaatttaaggatggccagagtgcgttcgcgcgtcgcttctgggaagaagccgctggcactggccgtctgggctatgtctttggtactccggtgcgttctgtggtgaacgaacgcgacgcagtacgtgttaccgcacgtgacggtcgcgaattcgcagcgaaacgtttggtttgcacgattccgctgaacgtattgagttctgttcattttagcccaccactgtccccgcaacgcatggccgctgcgaacattggccatgttaaccagtgcgtcaaagtgcatgcggaagtcagttgtccggatatgcgttcatggtcgggtatctcctatccgttcaacaaattagcctacgctatcggcgatggcacgaccccagcgggtaatacgcatattgtgtgccttgggggggcccataatcatatccagccggaagaggacgtggaagcaacgaagatggccgttgaaaacatgtcgcctgggaatatggatatcaaacgtctggtcttccacaactggtgcaaggatgaatttgccaaaggcgcgtggttcttcgcccctccacagctgctgtcaaagagcctggatgaacgtcgcgcacgtcacggtaatgtcctgtttgcaaactccgattgggccttaggttggcgtggttttatcgatggtgctatcgaggagggcacccgcgcagcggttactgtaattgaggaactgcgtcctgcgcctgcggtgcgttcccacctg

SEQ ID NO: 758 - protein, 495 aa, synthetic construct
  REGION 1..495: note = Variant of monoamine oxidase
MTSRDGYQWTPETGLTQGVPSLGVISPPTNIEDTDKDGPWDVIVIGGGYCGLTATRDLTVAGFKTLLLEARDRIGGRSWSSNIDGYPYEMGGTWVHWHQSHVWREITRYKMHNALSPSFNFSRGVNHFQLRTNPTTSTYMTHEAEAELLRSALHKFTNVDGTNGRTVLPFPHDMFYVPEFRKYDEMSYSERIDQIRDELSLNERSSLEAFILLCSGGTLENSSFGEFLHWWAMSGYTYQGCMDCLISYKFKDGQSAFARRFWEEAAGTGRLGYVFGTPVRSVVNERDAVRVTARDGREFAAKRLVCTIPLNVLSSVHFSPPLSPQRMAAANIGHVNQCVKVHAEVSCPDMRSWSGISYPFNKLAYAIGDGTTPAGNTHIVCLGGAHNHIQPEEDVEATKMAVENMSPGNMDIKRLVFHNWCKDEFAKGAWFFAPPQLLSKSLDERRARHGNVLFANSDWALGWRGFIDGAIEEGTRAAVTVIEELRPAPAVRSHL

SEQ ID NO: 759 - DNA, 1485 bp, synthetic construct
  misc_feature 1..1485: note = Variant of monoamine oxidase
  source 1..1485: mol_type = other DNA
atgaccagccgcgacggctatcagtggaccccggaaacgggtctgacccagggcgtaccgtccctgggtgtcatttcgccgccgactaacatcgaagataccgataaggacgggccttgggatgtcattgtcattgggggcgggtattgtgggctgaccgcaacccgtgatttaaccgtcgcagggttcaagacgctgctgctggaggcccgtgatcgtattggtggccgctcctggagcagtaatattgacggttacccgtatgagatgggtggcacttgggttcattggcatcaaccgcacgtgtggcgtgaaatcacgcgttataaaatgcacaacgcgctgtctccatcatttaacttttcacgtggcgtgaatcacttccaactgcgtaccaatccgaccaccagtacgtacatgacgcacgaagcggaggatgaactgctgcgtagcgcattgcataaattcaccaatgtcgacggcactaatggccgtacagtgttgccgttcccacatgatatgttttatgtgccggaatttcgcaagtatgacgaaatgtcatattccgaacgcattgaccagatccgcgacgatctgtctttgaacgaacgctctagtttagaggctttcattttattatgtagcggtggcaccctggaaaactccagctttggtgaatttctgcattggtgggcaatgtcgggttacacgtatcagggctgtatggattgtttaatttcctataaatttaaggatggccagagtgcgttcgcgcgtcgcttctgggaagaagccgctggcactggccgtctgggctatgtctttggttgtccggtgcgttctgtggtgaacgaacgcgacgcagtacgtgttaccgcacgtgacggtcgcgaattcgcagcgaaacgtttggtttgcacgattccgctgaacgtattgagttctgttcattttagcccaccactgtccccgcaacgcatggccgctgcgaacattggccatgttaaccagtgcgtcaaagtgcatgcggaagtcagtgacaaggatatgcgttcatggtcgggtatctcctatccgttcaacaaattagcctacgctatcggcgatggcacgaccccagcgggtaatacgcatattgtgtgccttgggggggcccataatcatatccagccggaagaggacgtggaagcaacgaagatggccgttgaaaacatgtcgcctgggaatatggatatcaaacgtctggtcttccacaactggtgcaaggatgaatttgccaaaggcgcgtggttcttcgcccctccacagctgctgtcaaagagcctggatgaactgcgctgccgtcacggtaatgtcctgtttgcaaactccgattgggccttaggttggcgtggttttatcgatggtgctatcgaggagggcacccgcgcagcggttactgtaattgaggaactgcgtcctgcgcctgcggtgcgttcccacctg

SEQ ID NO: 760 - protein, 495 aa, synthetic construct
  REGION 1..495: note = Variant of monoamine oxidase
MTSRDGYQWTPETGLTQGVPSLGVISPPTNIEDTDKDGPWDVIVIGGGYCGLTATRDLTVAGFKTLLLEARDRIGGRSWSSNIDGYPYEMGGTWVHWHQPHVWREITRYKMHNALSPSFNFSRGVNHFQLRTNPTTSTYMTHEAEDELLRSALHKFTNVDGTNGRTVLPFPHDMFYVPEFRKYDEMSYSERIDQIRDDLSLNERSSLEAFILLCSGGTLENSSFGEFLHWWAMSGYTYQGCMDCLISYKFKDGQSAFARRFWEEAAGTGRLGYVFGCPVRSVVNERDAVRVTARDGREFAAKRLVCTIPLNVLSSVHFSPPLSPQRMAAANIGHVNQCVKVHAEVSDKDMRSWSGISYPFNKLAYAIGDGTTPAGNTHIVCLGGAHNHIQPEEDVEATKMAVENMSPGNMDIKRLVFHNWCKDEFAKGAWFFAPPQLLSKSLDELRCRHGNVLFANSDWALGWRGFIDGAIEEGTRAAVTVIEELRPAPAVRSHL

SEQ ID NO: 761 - DNA, 1485 bp, synthetic construct
  misc_feature 1..1485: note = Variant of monoamine oxidase
  source 1..1485: mol_type = other DNA
atgaccagccgcgacggctatcagtggaccccggaaacgggtctgacccagggcgtaccgtccctgggtgtcatttcgccgccgactaacatcgaagataccgataaggacgggccttgggatgtcattgtcattgggggcgggtattgtgggctgaccgcaacccgtgatttaaccgtcgcagggttcaagacgctgctgctggaggcccgtgatcgtattggtggccgctcctggagcagtaatattgacggttacccgtatgagatgggtggcacttgggttcattggcatcaatctcacgtgtggcgtgaaatcacgcgttataaaatgcacaacgcgctgtctccatcatttaacttttcacgtggcgtgaatcacttccaactgcgtaccaatccgaccaccagtacgtacatgacgcacgaagcggaggatgaactgctgcgtagcgcattgcataaattcaccaatgtcgacggcactaatggccgtacagtgttgccgttcccacatgatatgttttatgtgccggaatttcgcaagtatgacgaaatgtcatattccgaacgcattgaccagatccgcgacgaactgtctttgaacgaacgctctagtttagaggctttcattttattatgtagcggtggcaccctggaaaactccagctttggtgaatttctgcattggtgggcaatgtcgggttacacgtatcagggctgtatggattgtttaatctcctataaatttaaggatggccagagtgcgttcgcgcgtcgcttctgggaagaagccgctggcactggccgtctgggctatgtctttggttgtccggtgcgttctgtggtggatgaacgcgacgcagtacgtgttaccgcacgtgacggtcgcgaattcgcagcgaaacgtttggtttgcacgattccgctgaacgtattgagttctgttcattttagcccaccactgtccccgcaacgcatggccgctgcgaacggcggccatgttaaccagtgcgtcaaagtgcatgcggaagtcagttgtccggatatgcgttcatggtcgggtatctcctatccgttcaacaaattagcctacgctatcggcgatggcacgaccccagcgggtaatacgcatattgtgtgccttgggggggcccataatcatatccagccggaagaggacgtggaagcaacgaagatggccgttgaaaacatgtcgcctgggaatatggatatcaaacgtctggtcttccacaactggtgcaaggatgaatttgccaaaggcgcgtggttcttcgcccctccacagctgctgtcaaagagcctggatgaactgcgctgccgtcacggtaatgtcctgtttgcaaactccgattgggccttaggttggcgtggttttatcgatggtgctatcgaggagggcacccgcgcagcggttactgtaattgaggaactgcgtcctgcgcctgcggtgcgttcccacctg

SEQ ID NO: 762 - protein, 495 aa, synthetic construct
  REGION 1..495: note = Variant of monoamine oxidase
MTSRDGYQWTPETGLTQGVPSLGVISPPTNIEDTDKDGPWDVIVIGGGYCGLTATRDLTVAGFKTLLLEARDRIGGRSWSSNIDGYPYEMGGTWVHWHQSHVWREITRYKMHNALSPSFNFSRGVNHFQLRTNPTTSTYMTHEAEDELLRSALHKFTNVDGTNGRTVLPFPHDMFYVPEFRKYDEMSYSERIDQIRDELSLNERSSLEAFILLCSGGTLENSSFGEFLHWWAMSGYTYQGCMDCLISYKFKDGQSAFARRFWEEAAGTGRLGYVFGCPVRSVVDERDAVRVTARDGREFAAKRLVCTIPLNVLSSVHFSPPLSPQRMAAANGGHVNQCVKVHAEVSCPDMRSWSGISYPFNKLAYAIGDGTTPAGNTHIVCLGGAHNHIQPEEDVEATKMAVENMSPGNMDIKRLVFHNWCKDEFAKGAWFFAPPQLLSKSLDELRCRHGNVLFANSDWALGWRGFIDGAIEEGTRAAVTVIEELRPAPAVRSHL

SEQ ID NO: 763 - DNA, 1485 bp, synthetic construct
  misc_feature 1..1485: note = Variant of monoamine oxidase
  source 1..1485: mol_type = other DNA
atgaccagccgcgacggctatcagtggaccccggaaacgggtctgacccagggcgtaccgtccctgggtgtcatttcgccgccgactaacatcgaagataccgataaggacgggccttgggatgtcattgtcattgggggcgggtattgtgggctgaccgcaacccgtgatttaaccgtcgcagggttcaagacgctgctgctggaggcccgtgatcgtattggtggccgctcctggagcagtaatattgacggttacccgtatgagatgggtggcacttgggttcattggcatcaaccgcacgtgtggcgtgaaatcacgcgttataaaatgcacaacgcgctgtctccatcatttaacttttcacgtggcgtgaatcacttccaactgcgtaccaatccgaccaccagtacgtacatgacgcacgaagcgtcggatgaactgatgcgtagcgcattgcataaattcaccaatgtcgacggcactaatggccgtacagtgttgccgttcccacatgatatgttttatgtgccggaatttcgcaagtatgacgaaatgtcatattccgaacgcattgaccagatccgcgacgatctgtctttgaacgaacgctctagtttagaggctttcattttattatgtagcggtggcaccctggaaaactccagctttggtgaatttctgcattggtgggcaatgtcgggttacacgtatcagggctgtattgattgtttaatgtcctataaatttaaggatggccagagtgcgttcgcgcgtcgcttctgggaagaagccgctggcactggccgtctgggctatgtctttggtactccggtgcgttctgtggtgaacgaacgcgacgcagtacgtgttaccgcacgtgacggtcgcgaattcgcagcgaaacgtttggtttgcacgattccgctgaacgtattgagttctgttcattttagcccaccactgtccccgcaacgcatggccgctgcgaacattggccatgttaaccagtgcgtcaaagtgcatgcggaagtcagttgcaaggatatgcgttcatggtcgggtatctcctatccgttcaacaaattagcctacgctatcggcgatggcacgaccccagcgggtaatacgcatattgtgtgccttgggggggcccataatcatatccagccggaagaggacgtggaagcaacgaagatggccgttgaaaacatgtcgcctgggaatatggatatcaaacgtctggtcttccacaactggtgcaaggatgaatttgccaaaggcgcgtggttcttcgcccctccacagctgctgtcaaagagcctggatgaactgcgcgcacgtcacggtaatgtcctgtttgcaaactccgattgggccttaggttggcgtggttttatcgatggtgctatcgaggagggcacccgcgcagcggttactgtaattgaggaactgcgtcctgcgcctgcggtgcgttcccacctg

SEQ ID NO: 764 - protein, 495 aa, synthetic construct
  REGION 1..495: note = Variant of monoamine oxidase
MTSRDGYQWTPETGLTQGVPSLGVISPPTNIEDTDKDGPWDVIVIGGGYCGLTATRDLTVAGFKTLLLEARDRIGGRSWSSNIDGYPYEMGGTWVHWHQPHVWREITRYKMHNALSPSFNFSRGVNHFQLRTNPTTSTYMTHEASDELMRSALHKFTNVDGTNGRTVLPFPHDMFYVPEFRKYDEMSYSERIDQIRDDLSLNERSSLEAFILLCSGGTLENSSFGEFLHWWAMSGYTYQGCIDCLMSYKFKDGQSAFARRFWEEAAGTGRLGYVFGTPVRSVVNERDAVRVTARDGREFAAKRLVCTIPLNVLSSVHFSPPLSPQRMAAANIGHVNQCVKVHAEVSCKDMRSWSGISYPFNKLAYAIGDGTTPAGNTHIVCLGGAHNHIQPEEDVEATKMAVENMSPGNMDIKRLVFHNWCKDEFAKGAWFFAPPQLLSKSLDELRARHGNVLFANSDWALGWRGFIDGAIEEGTRAAVTVIEELRPAPAVRSHL

SEQ ID NO: 765 - DNA, 1485 bp, synthetic construct
  misc_feature 1..1485: note = Variant of monoamine oxidase
  source 1..1485: mol_type = other DNA
atgaccagccgcgacggctatcagtggaccccggaaacgggtctgacccagggcgtaccgtccctgggtgtcatttcgccgccgactaacatcgaagataccgataaggacgggccttgggatgtcattgtcattgggggcgggtattgtgggctgaccgcaacccgtgatttaaccgtcgcagggttcaagacgctgctgctggaggcccgtgatcgtattggtggccgctcctggagcagtaacattgacggttacctgtatgagatgggtggcacttgggttcattggcatcaatctcacgtgtggcgtgaaatcacgcgttataaaatgcacggcgcgctgtctccgtcatttaacttttcacgtggcgtgaatcacttccaactgcgtaccaatccgaccaccagtacgtacatgacgcacgaagcggaggatgaactgctgcgtagcgcattgcataaattcaccaatgtcgacggcactaatggccgtacagtgttgccgttcccacatgatatgttttatgtgccggaatttcgcaagtatgacgaaatgtcatattccgaacgcattgaccagatccgcgacgaactgtctttgaacgaacgctctagtttagaggctttcattttattatgtagcggtggcaccctggaaaactccagctttggtgaatttctgcattggtgggcaatgtcgggttacacgtatcagggctgtatggattgtttaatctcctataaatttaaggatggccagagtgcgttcgcgcgtcgcttctgggaagaagccgctggcactggccgtctgggctatgtctttggttgtccggtgcgttctgtggtgaacgaacgcgacgcagtacgtgttaccgcacgtgacggtcgcgaattcgcagcgaaacgtttggtttgcacgattccgctgaacgtattgagttctgttcattttagcccaccactgtccccgcaacgcatggccgctgcgaacattggccatgttaaccagtgcgtcaaagtgcatgcggaagtcagttgtccggatatgcgttcatggtcgggtatctcctatccgttcaacaaattagcctacgctatcggcgatggcacgaccccagcgggtaatacgcatattgtgtgccttgggggggcccataatcatatccagccggaagaggacgtggaagcaacgaagatggccgttgaaaacatgtcgcctgggaatatggatatcaaacgtctggtcttccataactggtgcaaggatgaatttgccaaaggcgcgtggttcttcgcccctccacagctgctgtcaaagagcctggatgaactgcgctgccgtcacggtaatgtcctgtttgcaaactccgattgggccttaggttggcgtggttttatcgatggtgctatcgaggagggcacccgcgcagcggttactgtaattgaggaactgcgtcctgcgcctgcggtgcgttcccacctg

SEQ ID NO: 766 - protein, 495 aa, synthetic construct
  REGION 1..495: note = Variant of monoamine oxidase
MTSRDGYQWTPETGLTQGVPSLGVISPPTNIEDTDKDGPWDVIVIGGGYCGLTATRDLTVAGFKTLLLEARDRIGGRSWSSNIDGYLYEMGGTWVHWHQSHVWREITRYKMHGALSPSFNFSRGVNHFQLRTNPTTSTYMTHEAEDELLRSALHKFTNVDGTNGRTVLPFPHDMFYVPEFRKYDEMSYSERIDQIRDELSLNERSSLEAFILLCSGGTLENSSFGEFLHWWAMSGYTYQGCMDCLISYKFKDGQSAFARRFWEEAAGTGRLGYVFGCPVRSVVNERDAVRVTARDGREFAAKRLVCTIPLNVLSSVHFSPPLSPQRMAAANIGHVNQCVKVHAEVSCPDMRSWSGISYPFNKLAYAIGDGTTPAGNTHIVCLGGAHNHIQPEEDVEATKMAVENMSPGNMDIKRLVFHNWCKDEFAKGAWFFAPPQLLSKSLDELRCRHGNVLFANSDWALGWRGFIDGAIEEGTRAAVTVIEELRPAPAVRSHL

SEQ ID NO: 767 - DNA, 1485 bp, synthetic construct
  misc_feature 1..1485: note = Variant of monoamine oxidase
  source 1..1485: mol_type = other DNA
atgaccagccgcgacggctatcagtggaccccggaaacgggtctgacccagggcgtaccgtccctgggtgtcatttcgccgccgactaacatcgaagataccgataaggacgggccttgggatgtcattgtcattgggggcgggtattgtgggctgaccgcaacccgtgatttaaccgtcgcagggttcaagacgctgctgctggaggcccgtgatcgtattggtggccgctcctggagcagtaatattgacggttacccgtatgagatgggtggcacttgggttcattggcatcaaccgcacgtgtggcgtgaaatcacgcgttataaaatgcacaacgcgctgtctccatcatttaacttttcacgtggcgtgaatcacttccaactgcgtaccaatccgaccaccagtacgtacatgacgcacgaagcggaggatgaactgctgcgtagcgcattgcataaattcaccaatgtcgacggcactaatggccgtacagtgttgccgttcccacatgatatgttttatgtgccggaatttcgcaagtatgacgaaatgtcatattccgaacgcattgaccagatccgcgacgaactgtctttgaacgaacgctctagtttagaggctttcattttattatgtagcggtggcaccctggaaaactccagctttggtgaatttctgcattggtgggcaatgtcgggttacacgtatcagggctgtattgattgtttaatttcctataaatttaaggatggccagagtgcgttcgcgcgtcgcttctgggaagaagccgctggcactggccgtctgggctatgtctttggttgcccggtgcgttctgtggtgaacgaacgcgacgcagtacgtgttaccgcacgtgacggtcgcgaattcgcagcgaaacgtttggtttgcacgattccgctgaacgtattgagttctgttcattttagcccaccactgtccccgcaacgcatggccgctgcgaacattggccatgttaaccagtgcgtcaaagtgcatgcggaagtcagttgcaaggatatgcgttcatggtcgggtatctcctatccgttcaacaaattagcctacgctatcggcgatggcacgaccccagcgggtaatacgcatattgtgtgccttgggggggcccataatcatatccagccggaagaggacgtggaagcaacgaagatggccgttgaaaacatgtcgcctgggaatatggatatcaaacgtctggtcttccacaactggtgcaaggatgaatttgccaaaggcgcgtggttcttcgcccctccacagctgctgtcaaagagcctggatgaacgtcgctgtcgtcacggtaatgtcctgtttgcaaactccgattgggccttaggttggcgtggttttatcgatggtgctatcgaggagggcacccgcgcagcggttactgtaattgaggaactgcgtcctgcgcctgcggtgcgttcccacctg

SEQ ID NO: 768 - protein, 495 aa, synthetic construct
  REGION 1..495: note = Variant of monoamine oxidase
MTSRDGYQWTPETGLTQGVPSLGVISPPTNIEDTDKDGPWDVIVIGGGYCGLTATRDLTVAGFKTLLLEARDRIGGRSWSSNIDGYPYEMGGTWVHWHQPHVWREITRYKMHNALSPSFNFSRGVNHFQLRTNPTTSTYMTHEAEDELLRSALHKFTNVDGTNGRTVLPFPHDMFYVPEFRKYDEMSYSERIDQIRDELSLNERSSLEAFILLCSGGTLENSSFGEFLHWWAMSGYTYQGCIDCLISYKFKDGQSAFARRFWEEAAGTGRLGYVFGCPVRSVVNERDAVRVTARDGREFAAKRLVCTIPLNVLSSVHFSPPLSPQRMAAANIGHVNQCVKVHAEVSCKDMRSWSGISYPFNKLAYAIGDGTTPAGNTHIVCLGGAHNHIQPEEDVEATKMAVENMSPGNMDIKRLVFHNWCKDEFAKGAWFFAPPQLLSKSLDERRCRHGNVLFANSDWALGWRGFIDGAIEEGTRAAVTVIEELRPAPAVRSHL

SEQ ID NO: 769 - DNA, 1485 bp, synthetic construct
  misc_feature 1..1485: note = Variant of monoamine oxidase
  source 1..1485: mol_type = other DNA
atgaccagccgcgacggctatcagtggaccccggaaacgggtctgacccagggcgtaccgtccctgggtgtcatttcgccgccgactaacatcgaagataccgataaggacgggccttgggatgtcattgtcattgggggcgggtattgtgggctgaccgcaacccgtgatttaaccgtcgcagggttcaagacgctgctgctggaggcccgtgatcgtattggtggccgctcctggagcagtaatattgacggttacccgtatgagatgggtggcacttgggttcattggcatcaatcgcacgtgtggcgtgaaatcacgcgttataaaatgcacaacgcgctgtctccatcatttaacttttcacgtggcgtgaatcacttccaactgcgtaccaatccgaccaccagtacgtacatgacgcacgaagcggaggctgaactgatgcgtagcgcattgcataaattcaccaatgtcgacggcactaatggccgtacagtgttgccgttcccacatgatatgttttatgtgccggaatttcgcaagtatgacgaaatgtcatattccgaacgcattgaccagatccgcgacgaactgtctttgaacgaacgctctagtttagaggctttcattttattatgtagcggtggcaccctggaaaactccagctttggtgaatttctgcattggtgggcaatgtcgggttacacgtatcagggctgtatggattgtttaatctcctataaatttaaggatggccagagtgcgttcgcgcgtcgcttctgggaagaagccgctggcactggccgtctgggctatgtctttggtactccggtgcgttctgtggtgaacgaacgcgacgcagtacgtgttaccgcacgtgacggtcgcgaattcgcagcgaaacgtttggtttgcacgattccgctgaacgtattgagttctgttcattttagcccaccactgtccccgcaacgcatggccgctgcgaacattggccatgttaaccagtgcgtcaaagtgcatgcggaagtcagttgcaaggatatgcgttcatggtcgggtatctcctatccgttcaacaaattagcctacgctatcggcgatggcacgaccccagcgggtaatacgcatattgtgtgccttgggggggcccataatcatatccagccggaagaggacgtggaagcaacgaagatggccgttgaaaacatgtcgcctgggaatatggatatcaaacgtctggtcttccacaactggtgcaaggatgaatttgccaaaggcgcgtggttcttcgcccctccacagctgctgtcaaagagcctggatgaactgcgcgcacgtcacggtaatgtcctgtttgcaaactccgattgggccttaggttggcgtggttttatcgatggtgctatcgaggagggcacccgcgcagcggttactgtaattgaggaactgcgtcctgcgcctgcggtgcgttcccacctg

SEQ ID NO: 770 - protein, 495 aa, synthetic construct
  REGION 1..495: note = Variant of monoamine oxidase
MTSRDGYQWTPETGLTQGVPSLGVISPPTNIEDTDKDGPWDVIVIGGGYCGLTATRDLTVAGFKTLLLEARDRIGGRSWSSNIDGYPYEMGGTWVHWHQSHVWREITRYKMHNALSPSFNFSRGVNHFQLRTNPTTSTYMTHEAEAELMRSALHKFTNVDGTNGRTVLPFPHDMFYVPEFRKYDEMSYSERIDQIRDELSLNERSSLEAFILLCSGGTLENSSFGEFLHWWAMSGYTYQGCMDCLISYKFKDGQSAFARRFWEEAAGTGRLGYVFGTPVRSVVNERDAVRVTARDGREFAAKRLVCTIPLNVLSSVHFSPPLSPQRMAAANIGHVNQCVKVHAEVSCKDMRSWSGISYPFNKLAYAIGDGTTPAGNTHIVCLGGAHNHIQPEEDVEATKMAVENMSPGNMDIKRLVFHNWCKDEFAKGAWFFAPPQLLSKSLDELRARHGNVLFANSDWALGWRGFIDGAIEEGTRAAVTVIEELRPAPAVRSHL

SEQ ID NO: 771 - DNA, 1485 bp, synthetic construct
  misc_feature 1..1485: note = Variant of monoamine oxidase
  source 1..1485: mol_type = other DNA
atgaccagccgcgacggctatcagtggaccccggaaacgggtctgacccagggcgtaccgtccctgggtgtcatttcgccgccgactaacatcgaagataccgataaggacgggccttgggatgtcattgtcattgggggcgggtattgtgggctgaccgcaacccgtgatttaaccgtcgcagggttcaagacgctgctgctggaggcccgtgatcgtattggtggccgctcctggagcagtaatattgacggttacccgtatgagatgggtggcacttgggttcattggcatcaatctcacgtgtggcgtgaaatcacgcgttataaaatgcacaacgcgctgtctccatcatttaacttttcacgtggcgtgaatcacttccaactgcgtaccaatccgaccaccagtacgtacatgacgcacgaagcggaggctgaactgctgcgtagcgcattgcataaattcaccaatgtcgacggcactaatggccgtacagtgttgccgttcccacatgatatgttttatgtgccggaatttcgcaagtatgacgaaatgtcatattccgaacgcattgaccagatccgcgacgaactgtctttgaacgaacgctctagtttagaggctttcattttattatgtagcggtggcaccctggaaaactccagctttggtgaatttctgcattggtgggcaatgtcgggttacacgtatcagggctgtatggattgtttaatctcctataaatttaaggatggccagagtgcgttcgcgcgtcgcttctgggaagaagccgctggcactggccgtctgggctatgtctttggttgcccggtgcgttctgtggtgaacgaacgcgacgcagtacgtgttaccgcacgtgacggtcgcgaattcgcagcgaaacgtttggtttgcacgattccgctgaacgtattgagttctgttcattttagcccaccactgtccccgcaacgcatggccgctgcgaacattggccatgttaaccagtgcgtcaaagtgcatgcggaagtcagttgcaaggatatgcgttcatggtcgggtatctcctatccgttcaacaaattagcctacgctatcggcgatggcacgaccccagcgggtaatacgcatattgtgtgccttgggggggcccataatcatatccagccggaagaggacgtggaagcaacgaagatggccgttgaaaacatgtcgcctgggaatatggatatcaaacgtctggtcttccacaactggtgcaaggatgaatttgccaaaggcgcgtggttcttcgcccctccacagctgctgtcaaagagcctggatgaactgcgctgccgtcacggtaatgtcctgtttgcaaactccgattgggccttaggttggcgtggttttatcgatggtgctatcgaggagggcacccgcgcagcggttactgtaattgaggaactgcgtcctgcgcctgcggtgcgttcccacctg

SEQ ID NO: 772 - protein, 495 aa, synthetic construct
  REGION 1..495: note = Variant of monoamine oxidase
MTSRDGYQWTPETGLTQGVPSLGVISPPTNIEDTDKDGPWDVIVIGGGYCGLTATRDLTVAGFKTLLLEARDRIGGRSWSSNIDGYPYEMGGTWVHWHQSHVWREITRYKMHNALSPSFNFSRGVNHFQLRTNPTTSTYMTHEAEAELLRSALHKFTNVDGTNGRTVLPFPHDMFYVPEFRKYDEMSYSERIDQIRDELSLNERSSLEAFILLCSGGTLENSSFGEFLHWWAMSGYTYQGCMDCLISYKFKDGQSAFARRFWEEAAGTGRLGYVFGCPVRSVVNERDAVRVTARDGREFAAKRLVCTIPLNVLSSVHFSPPLSPQRMAAANIGHVNQCVKVHAEVSCKDMRSWSGISYPFNKLAYAIGDGTTPAGNTHIVCLGGAHNHIQPEEDVEATKMAVENMSPGNMDIKRLVFHNWCKDEFAKGAWFFAPPQLLSKSLDELRCRHGNVLFANSDWALGWRGFIDGAIEEGTRAAVTVIEELRPAPAVRSHL

SEQ ID NO: 773 - DNA, 1485 bp, synthetic construct
  misc_feature 1..1485: note = Variant of monoamine oxidase
  source 1..1485: mol_type = other DNA
atgaccagccgcgacggctatcagtggaccccggaaacgggtctgacccagggcgtaccgtccctgggtgtcatttcgccgccgactaacatcgaagataccgataaggacgggccttgggatgtcattgtcattgggggcgggtattgtgggctgaccgcaacccgtgatttaaccgtcgcagggttcaagacgctgctgctggaggcccgtgatcgtattggtggccgctcctggagcagtaatattgacggttacccgtatgagatgggtggcggctgggttcattggcatcaatctcacgtgtggcgtgaaatcacgcgttataaaatgcacaacgcgctgtctccatcatttaacttttcacgtggcgtgaatcacttccaactgcgtaccaatccgaccaccagtacgtacatgacgcacgaagcggaggatgaactgctgcgtagcgcattgcataaattcaccaatgtcgacggcactaatggccgtacagtgttgccgttcccacatgatatgttttatgtgccggaatttcgcaagtatgacgaaatgtcatattccgaacgcattgaccagatccgcgacgaactgtctttgaacgaacgctctagtttagaggctttcattttattatgtagcggtggcaccctggaaaactccagctttggtgaatttctgcattggtgggcaatgtcgggttacacgcgtcagggctgtatggattgtttaatctcctataaatttaaggatggccagagtgcgttcgcgcgtcgcttctgggaagaagccgctggcactggccgtctgggctatgtctttggttgtccggtgcgttctgtggtgaatgaacgcgacgcagtacgtgttaccgcacgtgacggtcgcgaattcgcagcgaaacgtttggtttgcacgattccgctgaacgtattgagttctgttcattttagcccaccactgtccccgcaacgcatggccgctgcgaacatcggccatgttaaccagtgcgtcaaagtgcatgcggaagtcagttgtccggatatgcgttcatggtcgggtatctcctatccgttcaacaaattagcctacgctatcggcgatggcacgaccccagcgggtaatacgcatattgtgtgccttgggggggcccataatcatatccagccggaagaggacgtggaagcaacgaagatggccgttgaaaacatgtcgcctgggaatatggatatcaaacgtctggtcttccacaactggtgcaaggatgaatttgccaaaggcgcgtggttcttcgcccctccacagctgctgtcaaagagcctggatgaactgcgctgccgtcacggtaatgtcctgtttgcaaactccgattgggccttaggttggcgtggttttatcgatggtgctatcgaggagggcacccgcgcagcggttactgtaattgaggaactgcgtcctgcgcctgcggtgcgttcccacctg

SEQ ID NO: 774 - protein, 495 aa, synthetic construct
  REGION 1..495: note = Variant of monoamine oxidase
MTSRDGYQWTPETGLTQGVPSLGVISPPTNIEDTDKDGPWDVIVIGGGYCGLTATRDLTVAGFKTLLLEARDRIGGRSWSSNIDGYPYEMGGGWVHWHQSHVWREITRYKMHNALSPSFNFSRGVNHFQLRTNPTTSTYMTHEAEDELLRSALHKFTNVDGTNGRTVLPFPHDMFYVPEFRKYDEMSYSERIDQIRDELSLNERSSLEAFILLCSGGTLENSSFGEFLHWWAMSGYTRQGCMDCLISYKFKDGQSAFARRFWEEAAGTGRLGYVFGCPVRSVVNERDAVRVTARDGREFAAKRLVCTIPLNVLSSVHFSPPLSPQRMAAANIGHVNQCVKVHAEVSCPDMRSWSGISYPFNKLAYAIGDGTTPAGNTHIVCLGGAHNHIQPEEDVEATKMAVENMSPGNMDIKRLVFHNWCKDEFAKGAWFFAPPQLLSKSLDELRCRHGNVLFANSDWALGWRGFIDGAIEEGTRAAVTVIEELRPAPAVRSHL

SEQ ID NO: 775 - DNA, 1485 bp, synthetic construct
  misc_feature 1..1485: note = Variant of monoamine oxidase
  source 1..1485: mol_type = other DNA
atgaccagccgcgacggctatcagtggaccccggaaacgggtctgacccagggcgtaccgtccctgggtgtcatttcgccgccgactaacatcgaagataccgataaggacgggccttgggatgtcattgtcattgggggcgggtattgtgggctgaccgcaacccgtgatttaaccgtcgcagggttcaagacgctgctgctggaggcccgtgatcgtattggtggccgctcctggagcagtaatattgacggttacccgtatgagatgggtggcacttgggttcattggcatcaatctcacgtgtggcgtgaaatcacgcgttataaaatgcacaacgcgctgtctccatcatttaacttttcacgtggcgtgaatcacttccaactgcgtaccaatccgaccaccagtacgtacatgacgcacgaagcgtcggatgaactgctgcgtagcgcattgcataaattcaccaatgtcgacggcactaatggccgtacagtgttgccgttcccacatgatatgttttatgtgccggaatttcgcaagtatgacgaaatgtcatattccgaacgcattgaccagatccgcgacgaactgtctttgaacgaacgctctagtttagaggctttcattttattatgtagcggtggcaccctggaaaactccagctttggtgaatttctgcattggtgggcaatgtcgggttacacgtatcagggctgtatggattgtttaatgtcctataaatttaaggatggccagagtgcgttcgcgcgtcgcttctgggaagaagccgctggcactggccgtctgggctatgtctttggttgtccggtgcgttctgtggtgaacgaacgcgacgcagtacgtgttaccgcacgtgacggtcgcgaattcgcagcgaaacgtttggtttgcacgattccgctgaacgtattgagttctgttcattttagcccaccactgtccccgcaacgcatggccgctgcgaacattggccatgttaaccagtgcgtcaaagtgcatgcggaagtcagttgtccggatatgcgttcatggtcgggtatctcctatccgttcaacaaattagcctacgctatcggcgatggcacgaccccagcgggtaatacgcatattgtgtgccttgggggggcccataatcatatccagccggaagaggacgtggaagcaacgaagatggccgttgaaaacatgtcgcctgggaatatggatatcaaacgtctggtcttccacaactggtgcaaggatgaatttgccaaaggcgcgtggttcttcgcccctccacagctgctgtcaaagagcctggatgaactgcgctgtcgtcacggtaatgtcctgtttgcaaactccgattgggccttaggttggcgtggttttatcgatggtgctatcgaggagggcacccgcgcagcggttactgtaattgaggaactgcgtcctgcgcctgcggtgcgttcccacctg

SEQ ID NO: 776 - protein, 495 aa, synthetic construct
  REGION 1..495: note = Variant of monoamine oxidase
MTSRDGYQWTPETGLTQGVPSLGVISPPTNIEDTDKDGPWDVIVIGGGYCGLTATRDLTVAGFKTLLLEARDRIGGRSWSSNIDGYPYEMGGTWVHWHQSHVWREITRYKMHNALSPSFNFSRGVNHFQLRTNPTTSTYMTHEASDELLRSALHKFTNVDGTNGRTVLPFPHDMFYVPEFRKYDEMSYSERIDQIRDELSLNERSSLEAFILLCSGGTLENSSFGEFLHWWAMSGYTYQGCMDCLMSYKFKDGQSAFARRFWEEAAGTGRLGYVFGCPVRSVVNERDAVRVTARDGREFAAKRLVCTIPLNVLSSVHFSPPLSPQRMAAANIGHVNQCVKVHAEVSCPDMRSWSGISYPFNKLAYAIGDGTTPAGNTHIVCLGGAHNHIQPEEDVEATKMAVENMSPGNMDIKRLVFHNWCKDEFAKGAWFFAPPQLLSKSLDELRCRHGNVLFANSDWALGWRGFIDGAIEEGTRAAVTVIEELRPAPAVRSHL

SEQ ID NO: 777 - DNA, 1485 bp, synthetic construct
  misc_feature 1..1485: note = Variant of monoamine oxidase
  source 1..1485: mol_type = other DNA
atgaccagccgcgacggctatcagtggaccccggaaacgggtctgacccagggcgtaccgtccctgggtgtcatttcgccgccgactaacatcgaagataccgataaggacgggccttgggatgtcattgtcattgggggcgggtattgtgggctgaccgcaacccgtgatttaaccgtcgcagggttcaagacgctgctgctggaggcccgtgatcgtattggtggccgctcctggagcagtaatattgacggttacccgtatgagatgggtggcacttgggttcattggcatcaatcgcacgtgtggcgtgaaatcacgcgttataaaatgcacaacgcgctgtctccatcatttaacttttcacgtggcgtgaatcacttccaactgcgtaccaatccgaccaccagtacgtacatgacgcacgaagcggaggctgaactgctgcgtagcgcattgcataaattcaccaatgtcgacggcactaatggccgtacagtgttgccgttcccacatgatatgttttatgtgccggaatttcgcaagtatgacgaaatgtcatattccgaacgcattgaccagatccgcgacgatctgtctttgaacgaacgctctagtttagaggctttcattttattatgtagcggtggcaccctggaaaactccagctttggtgaatttctgcattggtgggcaatgtcgggttacacgtatcagggctgtatggattgtttaatgtcctataaatttaaggatggccagagtgcgttcgcgcgtcgcttctgggaagaagccgctggcactggccgtctgggctatgtctttggtactccggtgcgttctgtggtgaacgaacgcgacgcagtacgtgttaccgcacgtgacggtcgcgaattcgcagcgaaacgtttggtttgcacgattccgctgaacgtattgagttctgttcattttagcccaccactgtccccgcaacgcatggccgctgcgaacattggccatgttaaccagtgcgtcaaagtgcatgcggaagtcagttgcccagatatgcgttcatggtcgggtatctcctatccgttcaacaaattagcctacgctatcggcgatggcacgaccccagcgggtaatacgcatattgtgtgccttgggggggcccataatcatatccagccggaagaggacgtggaagcaacgaagatggccgttgaaaacatgtcgcctgggaatatggatatcaaacgtctggtcttccacaactggtgcaaggatgaatttgccaaaggcgcgtggttcttcgcccctccacagctgctgtcaaagagcctggatgaactgcgctgccgtcacggtaatgtcctgtttgcaaactccgattgggccttaggttggcgtggttttatcgatggtgctatcgaggagggcacccgcgcagcggttactgtaattgaggaactgcgtcctgcgcctgcggtgcgttcccacctg

SEQ ID NO: 778 - protein, 495 aa, synthetic construct
  REGION 1..495: note = Variant of monoamine oxidase
MTSRDGYQWTPETGLTQGVPSLGVISPPTNIEDTDKDGPWDVIVIGGGYCGLTATRDLTVAGFKTLLLEARDRIGGRSWSSNIDGYPYEMGGTWVHWHQSHVWREITRYKMHNALSPSFNFSRGVNHFQLRTNPTTSTYMTHEAEAELLRSALHKFTNVDGTNGRTVLPFPHDMFYVPEFRKYDEMSYSERIDQIRDDLSLNERSSLEAFILLCSGGTLENSSFGEFLHWWAMSGYTYQGCMDCLMSYKFKDGQSAFARRFWEEAAGTGRLGYVFGTPVRSVVNERDAVRVTARDGREFAAKRLVCTIPLNVLSSVHFSPPLSPQRMAAANIGHVNQCVKVHAEVSCPDMRSWSGISYPFNKLAYAIGDGTTPAGNTHIVCLGGAHNHIQPEEDVEATKMAVENMSPGNMDIKRLVFHNWCKDEFAKGAWFFAPPQLLSKSLDELRCRHGNVLFANSDWALGWRGFIDGAIEEGTRAAVTVIEELRPAPAVRSHL

SEQ ID NO: 779 - DNA, 1485 bp, synthetic construct
  misc_feature 1..1485: note = Variant of monoamine oxidase
  source 1..1485: mol_type = other DNA
atgaccagccgcgacggctatcagtggaccccggaaacgggtctgacccagggcgtaccgtccctgggtgtcatttcgccgccgactaacatcgaagataccgataaggacgggccttgggatgtcattgtcattgggggcgggtattgtgggctgaccgcaacccgtgatttaaccgtcgcagggttcaagacgctgctgctggaggcccgtgatcgtattggtggccgctcctggagcagtaatattgacggttacccgtatgagatgggtggcacttgggttcattggcatcaaccgcacgtgtggcgtgaaatcacgcgttataaaatgcacaacgcgctgtctccatcatttaacttttcacgtggcgtgaatcacttccaactgcgtaccaatccgaccaccagtacgtacatgacgcacgaagcgtcggatgaactgatgcgtagcgcattgcataaattcaccaatgtcgacggcactaatggccgtacagtgttgccgttcccacatgatatgttttatgtgccggaatttcgcaagtatgacgaaatgtcatattccgaacgcattgaccagatccgcgacgaactgtctttgaacgaacgctctagtttagaggctttcattttattatgtagcggtggcaccctggaaaactccagctttggtgaatttctgcattggtgggcaatgtcgggttacacgtatcagggctgtattgattgtttaatgtcctataaatttaaggatggccagagtgcgttcgcgcgtcgcttctgggaagaagccgctggcactggccgtctgggctatgtctttggtactccggtgcgttctgtggtgaacgaacgcgacgcagtacgtgttaccgcacgtgacggtcgcgaattcgcagcgaaacgtttggtttgcacgattccgctgaacgtattgagttctgttcattttagcccaccactgtccccgcaacgcatggccgctgcgaacattggccatgttaaccagtgcgtcaaagtgcatgcggaagtcagtaacccagatatgcgttcatggtcgggtatctcctatccgttcaacaaattagcctacgctatcggcgatggcacgaccccagcgggtaatacgcatattgtgtgccttgggggggcccataatcatatccagccggaagaggacgtggaagcaacgaagatggccgttgaaaacatgtcgcctgggaatatggatatcaaacgtctggtcttccacaactggtgcaaggatgaatttgccaaaggcgcgtggttcttcgcccctccacagctgctgtcaaagagcctggatgaacgtcgctgtcgtcacggtaatgtcctgtttgcaaactccgattgggccttaggttggcgtggttttatcgatggtgctatcgaggagggcacccgcgcagcggttactgtaattgaggaactgcgtcctgcgcctgcggtgcgttcccacctg

SEQ ID NO: 780 - protein, 495 aa, synthetic construct
  REGION 1..495: note = Variant of monoamine oxidase
MTSRDGYQWTPETGLTQGVPSLGVISPPTNIEDTDKDGPWDVIVIGGGYCGLTATRDLTVAGFKTLLLEARDRIGGRSWSSNIDGYPYEMGGTWVHWHQPHVWREITRYKMHNALSPSFNFSRGVNHFQLRTNPTTSTYMTHEASDELMRSALHKFTNVDGTNGRTVLPFPHDMFYVPEFRKYDEMSYSERIDQIRDELSLNERSSLEAFILLCSGGTLENSSFGEFLHWWAMSGYTYQGCIDCLMSYKFKDGQSAFARRFWEEAAGTGRLGYVFGTPVRSVVNERDAVRVTARDGREFAAKRLVCTIPLNVLSSVHFSPPLSPQRMAAANIGHVNQCVKVHAEVSNPDMRSWSGISYPFNKLAYAIGDGTTPAGNTHIVCLGGAHNHIQPEEDVEATKMAVENMSPGNMDIKRLVFHNWCKDEFAKGAWFFAPPQLLSKSLDERRCRHGNVLFANSDWALGWRGFIDGAIEEGTRAAVTVIEELRPAPAVRSHL

SEQ ID NO: 781 - DNA, 1485 bp, synthetic construct
  misc_feature 1..1485: note = Variant of monoamine oxidase
  source 1..1485: mol_type = other DNA
atgaccagccgcgacggctatcagtggaccccggaaacgggtctgacccagggcgtaccgtccctgggtgtcatttcgccgccgactaacatcgaagataccgataaggacgggccttgggatgtcattgtcattgggggcgggtattgtgggctgaccgcaacccgtgatttaaccgtcgcagggttcaagacgctgctgctggaggcccgtgatcgtattggtggccgctcctggagcagtaatattgacggttacccgtatgagatgggtggcacttgggttcattggcatcaaccgcacgtgtggcgtgaaatcacgcgttataaaatgcacaacgcgctgtctccatcatttaacttttcacgtggcgtgaatcacttccaactgcgtaccaatccgaccaccagtacgtacatgacgcacgaagcgtcggatgaactgctgcgtagcgcattgcataaattcaccaatgtcgacggcactaatggccgtacagtgttgccgttcccacatgatatgttttatgtgccggaatttcgcaagtatgacgaaatgtcatattccgaacgcattgaccagatccgcgacgaactgtctttgaacgaacgcactagtttagaggctttcattttattatgtagcggtggcaccctggaaaactccagctttggtgaatttctgcattggtgggcaatgtcgggttacacgtatcagggctgtatggattgtttaatttcctataaatttaaggatggccagagtgcgttcgcgcgtcgcttctgggaagaagccgctggcactggccgtctgggctatgtctttggtactccggtgcgttctgtggtgaacgaacgcgacgcagtacgtgttaccgcacgtgacggtcgcgaattcgcagcgaaacgtttggtttgcacgattccgctgaacgtattgagttctgttcattttagcccaccactgtccccgcaacgcatggccgctgcgaacattggccatgttaaccagtgcgtcaaagtgcatgcggaagtcagttgcaaggatatgcgttcatggtcgggtatctcctatccgttcaacaaattagcctacgctatcggcgatggcacgaccccagcgggtaatacgcatattgtgtgccttgggggggcccataatcatatccagccggaagaggacgtggaagcaacgaagatggccgttgaaaacatgtcgcctgggaatatggatatcaaacgtctggtcttccacaactggtgcaaggatgaatttgccaaaggcgcgtggttcttcgcccctccacagctgctgtcaaagagcctggatgaactgcgctgtcgtcacggtaatgtcctgtttgcaaactccgattgggccttaggttggcgtggttttatcgatggtgctatcgaggagggcacccgcgcagcggttactgtaattgaggaactgcgtcctgcgcctgcggtgcgttcccacctg

SEQ ID NO: 782 - protein, 495 aa, synthetic construct
  REGION 1..495: note = Variant of monoamine oxidase
MTSRDGYQWTPETGLTQGVPSLGVISPPTNIEDTDKDGPWDVIVIGGGYCGLTATRDLTVAGFKTLLLEARDRIGGRSWSSNIDGYPYEMGGTWVHWHQPHVWREITRYKMHNALSPSFNFSRGVNHFQLRTNPTTSTYMTHEASDELLRSALHKFTNVDGTNGRTVLPFPHDMFYVPEFRKYDEMSYSERIDQIRDELSLNERTSLEAFILLCSGGTLENSSFGEFLHWWAMSGYTYQGCMDCLISYKFKDGQSAFARRFWEEAAGTGRLGYVFGTPVRSVVNERDAVRVTARDGREFAAKRLVCTIPLNVLSSVHFSPPLSPQRMAAANIGHVNQCVKVHAEVSCKDMRSWSGISYPFNKLAYAIGDGTTPAGNTHIVCLGGAHNHIQPEEDVEATKMAVENMSPGNMDIKRLVFHNWCKDEFAKGAWFFAPPQLLSKSLDELRCRHGNVLFANSDWALGWRGFIDGAIEEGTRAAVTVIEELRPAPAVRSHL

SEQ ID NO: 783 - DNA, 1485 bp, synthetic construct
  misc_feature 1..1485: note = Variant of monoamine oxidase
  source 1..1485: mol_type = other DNA
atgaccagccgcgacggctatcagtggaccccggaaacgggtctgacccagggcgtaccgtccctgggtgtcatttcgccgccgactaacatcgaagataccgataaggacgggccttgggatgtcattgtcattgggggcgggtattgtgggctgaccgcaacccgtgatttaaccgtcgcagggttcaagacgctgctgctggaggcccgtgatcgtattggtggccgctcctggagcagtaatattgacggttacccgtatgagatgggtggcacttgggttcattggcatcaatcgcacgtgtggcgtgaaatcacgcgttataaaatgcacaacgcgctgtctccatcatttaacttttcacgtggcgtgaatcacttccaactgcgtaccaatccgaccaccagtacgtacatgacgcacgaagcggaggatgaactgctgcgtagcgcattgcataaattcaccaatgtcgacggcactaatggccgtacagtgttgccgttcccacatgatatgttttatgtgccggaatttcgcaagtatgacgaaatgtcatattccgaacgcattgaccagatccgcgacgaactgtctttgaacgaacgcactagtttagaggctttcattttattatgtagcggtggcaccctggaaaactccagctttggtgaatttctgcattggtgggcaatgtcgggttacacgtatcagggctgtatggattgtttaatctcctataaatttaaggatggccagagtgcgttcgcgcgtcgcttctgggaagaagccgctggcactggccgtctgggctatgtctttggttgcccggtgcgttctgtggtgaacgaacgcgacgcagtacgtgttaccgcacgtgacggtcgcgaattcgcagcgaaacgtttggtttgcacgattccgctgaacgtattgagttctgttcattttagcccaccactgtccccgcaacgcatggccgctgcgaacattggccatgttaaccagtgcgtcaaagtgcatgcggaagtcagtgacaaggatatgcgttcatggtcgggtatctcctatccgttcaacaaattagcctacgctatcggcgatggcacgaccccagcgggtaatacgcatattgtgtgccttgggggggcccataatcatatccagccggaagaggacgtggaagcaacgaagatggccgttgaaaacatgtcgcctgggaatatggatatcaaacgtctggtcttccacaactggtgcaaggatgaatttgccaaaggcgcgtggttcttcgcccctccacagctgctgtcaaagagcctggatgaacgtcgcgcacgtcacggtaatgtcctgtttgcaaactccgattgggccttaggttggcgtggttttatcgatggtgctatcgaggagggcacccgcgcagcggttactgtaattgaggaactgcgtcctgcgcctgcggtgcgttcccacctg

SEQ ID NO: 784 - protein, 495 aa, synthetic construct
  REGION 1..495: note = Variant of monoamine oxidase
MTSRDGYQWTPETGLTQGVPSLGVISPPTNIEDTDKDGPWDVIVIGGGYCGLTATRDLTVAGFKTLLLEARDRIGGRSWSSNIDGYPYEMGGTWVHWHQSHVWREITRYKMHNALSPSFNFSRGVNHFQLRTNPTTSTYMTHEAEDELLRSALHKFTNVDGTNGRTVLPFPHDMFYVPEFRKYDEMSYSERIDQIRDELSLNERTSLEAFILLCSGGTLENSSFGEFLHWWAMSGYTYQGCMDCLISYKFKDGQSAFARRFWEEAAGTGRLGYVFGCPVRSVVNERDAVRVTARDGREFAAKRLVCTIPLNVLSSVHFSPPLSPQRMAAANIGHVNQCVKVHAEVSDKDMRSWSGISYPFNKLAYAIGDGTTPAGNTHIVCLGGAHNHIQPEEDVEATKMAVENMSPGNMDIKRLVFHNWCKDEFAKGAWFFAPPQLLSKSLDERRARHGNVLFANSDWALGWRGFIDGAIEEGTRAAVTVIEELRPAPAVRSHL

SEQ ID NO: 785 - DNA, 1485 bp, synthetic construct
  misc_feature 1..1485: note = Variant of monoamine oxidase
  source 1..1485: mol_type = other DNA
atgaccagccgcgacggctatcagtggaccccggaaacgggtctgacccagggcgtaccgtccctgggtgtcatttcgccgccgactaacatcgaagataccgataaggacgggccttgggatgtcattgtcattgggggcgggtattgtgggctgaccgcaacccgtgatttaaccgtcgcagggttcaagacgctgctgctggaggcccgtgatcgtattggtggccgctcctggagcagtaatattgacggttacccgtatgagatgggtggcacttgggttcattggcatcaatcgcacgtgtggcgtgaaatcacgcgttataaaatgcacaacgcgctgtctccatcatttaacttttcacgtggcgtgaatcacttccaactgcgtaccaatccgaccaccagtacgtacatgacgcacgaagcgtcggatgaactgatgcgtagcgcattgcataaattcaccaatgtcgacggcactaatggccgtacagtgttgccgttcccacatgatatgttttatgtgccggaatttcgcaagtatgacgaaatgtcatattccgaacgcattgaccagatccgcgacgaactgtctttgaacgaacgctctagtttagaggctttcattttattatgtagcggtggcaccctggaaaactccagctttggtgaatttctgcattggtgggcaatgtcgggttacacgtatcagggctgtatggattgtttaatgtcctataaatttaaggatggccagagtgcgttcgcgcgtcgcttctgggaagaagccgctggcactggccgtctgggctatgtctttggttgtccggtgcgttctgtggtgaacgaacgcgacgcagtacgtgttaccgcacgtgacggtcgcgaattcgcagcgaaacgtttggtttgcacgattccgctgaacgtattgagttctgttcattttagcccaccactgtccccgcaacgcatggccgctgcgaacattggccatgttaaccagtgcgtcaaagtgcatgcggaagtcagtgacccagatatgcgttcatggtcgggtatctcctatccgttcaacaaattagcctacgctatcggcgatggcacgaccccagcgggtaatacgcatattgtgtgccttgggggggcccataatcatatccagccggaagaggacgtggaagcaacgaagatggccgttgaaaacatgtcgcctgggaatatggatatcaaacgtctggtcttccacaactggtgcaaggatgaatttgccaaaggcgcgtggttcttcgcccctccacagctgctgtcaaagagcctggatgaacgtcgctgtcgtcacggtaatgtcctgtttgcaaactccgattgggccttaggttggcgtggttttatcgatggtgctatcgaggagggcacccgcgcagcggttactgtaattgaggaactgcgtcctgcgcctgcggtgcgttcccacctg

SEQ ID NO: 786 - protein, 495 aa, synthetic construct
  REGION 1..495: note = Variant of monoamine oxidase
MTSRDGYQWTPETGLTQGVPSLGVISPPTNIEDTDKDGPWDVIVIGGGYCGLTATRDLTVAGFKTLLLEARDRIGGRSWSSNIDGYPYEMGGTWVHWHQSHVWREITRYKMHNALSPSFNFSRGVNHFQLRTNPTTSTYMTHEASDELMRSALHKFTNVDGTNGRTVLPFPHDMFYVPEFRKYDEMSYSERIDQIRDELSLNERSSLEAFILLCSGGTLENSSFGEFLHWWAMSGYTYQGCMDCLMSYKFKDGQSAFARRFWEEAAGTGRLGYVFGCPVRSVVNERDAVRVTARDGREFAAKRLVCTIPLNVLSSVHFSPPLSPQRMAAANIGHVNQCVKVHAEVSDPDMRSWSGISYPFNKLAYAIGDGTTPAGNTHIVCLGGAHNHIQPEEDVEATKMAVENMSPGNMDIKRLVFHNWCKDEFAKGAWFFAPPQLLSKSLDERRCRHGNVLFANSDWALGWRGFIDGAIEEGTRAAVTVIEELRPAPAVRSHL

SEQ ID NO: 787 - DNA, 1485 bp, synthetic construct
  misc_feature 1..1485: note = Variant of monoamine oxidase
  source 1..1485: mol_type = other DNA
atgaccagccgcgacggctatcagtggaccccggaaacgggtctgacccagggcgtaccgtccctgggtgtcatttcgccgccgactaacatcgaagataccgataaggacgggccttgggatgtcattgtcattgggggcgggtattgtgggctgaccgcaacccgtgatttaaccgtcgcagggttcaagacgctgctgctggaggcccgtgatcgtattggtggccgctcctggagcagtaatattgacggttacccgtatgagatgggtggcacttgggttcattggcatcaatcgcacgtgtggcgtgaaatcacgcgttataaaatgcacaacgcgctgtctccatcatttaacttttcacgtggcgtgaatcacttccaactgcgtaccaatccgaccaccagtacgtacatgacgcacgaagcgtcggatgaactgctgcgtagcgcattgcataaattcaccaatgtcgacggcactaatggccgtacagtgttgccgttcccacatgatatgttttatgtgccggaatttcgcaagtatgacgaaatgtcatattccgaacgcattgaccagatccgcgacgaactgtctttgaacgaacgctctagtttagaggctttcattttattatgtagcggtggcaccctggaaaactccagctttggtgaatttctgcattggtgggcaatgtcgggttacacgtatcagggctgtatggattgtttaatctcctataaatttaaggatggccagagtgcgttcgcgcgtcgcttctgggaagaagccgctggcactggccgtctgggctatgtctttggttgcccggtgcgttctgtggtgaacgaacgcgacgcagtacgtgttaccgcacgtgacggtcgcgaattcgcagcgaaacgtttggtttgcacgattccgctgaacgtattgagttctgttcattttagcccaccactgtccccgcaacgcatggccgctgcgaacattggccatgttaaccagtgcgtcaaagtgcatgcggaagtcagttgcccagatatgcgttcatggtcgggtatctcctatccgttcaacaaattagcctacgctatcggcgatggcacgaccccagcgggtaatacgcatattgtgtgccttgggggggcccataatcatatccagccggaagaggacgtggaagcaacgaagatggccgttgaaaacatgtcgcctgggaatatggatatcaaacgtctggtcttccacaactggtgcaaggatgaatttgccaaaggcgcgtggttcttcgcccctccacagctgctgtcaaagagcctggatgaacgtcgcgcacgtcacggtaatgtcctgtttgcaaactccgattgggccttaggttggcgtggttttatcgatggtgctatcgaggagggcacccgcgcagcggttactgtaattgaggaactgcgtcctgcgcctgcggtgcgttcccacctg

SEQ ID NO: 788 - protein, 495 aa, synthetic construct
  REGION 1..495: note = Variant of monoamine oxidase
MTSRDGYQWTPETGLTQGVPSLGVISPPTNIEDTDKDGPWDVIVIGGGYCGLTATRDLTVAGFKTLLLEARDRIGGRSWSSNIDGYPYEMGGTWVHWHQSHVWREITRYKMHNALSPSFNFSRGVNHFQLRTNPTTSTYMTHEASDELLRSALHKFTNVDGTNGRTVLPFPHDMFYVPEFRKYDEMSYSERIDQIRDELSLNERSSLEAFILLCSGGTLENSSFGEFLHWWAMSGYTYQGCMDCLISYKFKDGQSAFARRFWEEAAGTGRLGYVFGCPVRSVVNERDAVRVTARDGREFAAKRLVCTIPLNVLSSVHFSPPLSPQRMAAANIGHVNQCVKVHAEVSCPDMRSWSGISYPFNKLAYAIGDGTTPAGNTHIVCLGGAHNHIQPEEDVEATKMAVENMSPGNMDIKRLVFHNWCKDEFAKGAWFFAPPQLLSKSLDERRARHGNVLFANSDWALGWRGFIDGAIEEGTRAAVTVIEELRPAPAVRSHL

SEQ ID NO: 789 - DNA, 1485 bp, synthetic construct
  misc_feature 1..1485: note = Variant of monoamine oxidase
  source 1..1485: mol_type = other DNA
atgaccagccgcgacggctatcagtggaccccggaaacgggtctgacccagggcgtaccgtccctgggtgtcatttcgccgccgactaacatcgaagataccgataaggacgggccttgggatgtcattgtcattgggggcgggtattgtgggctgaccgcaacccgtgatttaaccgtcgcagggttcaagacgctgctgctggaggcccgtgatcgtattggtggccgctcctggagcagtaatattgacggttacccgtatgagatgggtggcacttgggttcattggcatcaaccgcacgtgtggcgtgaaatcacgcgttataaaatgcacaacgcgctgtctccatcatttaacttttcacgtggcgtgaatcacttccaactgcgtaccaatccgaccaccagtacgtacatgacgcacgaagcggaggatgaactgatgcgtagcgcattgcataaattcaccaatgtcgacggcactaatggccgtacagtgttgccgttcccacatgatatgttttatgtgccggaatttcgcaagtatgacgaaatgtcatattccgaacgcattgaccagatccgcgacgaactgtctttgaacgaacgctctagtttagaggctttcattttattatgtagcggtggcaccctggaaaactccagctttggtgaatttctgcattggtgggcaatgtcgggttacacgtatcagggctgtatggattgtttaatgtcctataaatttaaggatggccagagtgcgttcgcgcgtcgcttctgggaagaagccgctggcactggccgtctgggctatgtctttggtactccggtgcgttctgtggtgaacgaacgcgacgcagtacgtgttaccgcacgtgacggtcgcgaattcgcagcgaaacgtttggtttgcacgattccgctgaacgtattgagttctgttcattttagcccaccactgtccccgcaacgcatggccgctgcgaacattggccatgttaaccagtgcgtcaaagtgcatgcggaagtcagttgcaaggatatgcgttcatggtcgggtatctcctatccgttcaacaaattagcctacgctatcggcgatggcacgaccccagcgggtaatacgcatattgtgtgccttgggggggcccataatcatatccagccggaagaggacgtggaagcaacgaagatggccgttgaaaacatgtcgcctgggaatatggatatcaaacgtctggtcttccacaactggtgcaaggatgaatttgccaaaggcgcgtggttcttcgcccctccacagctgctgtcaaagagcctggatgaacgtcgctgtcgtcacggtaatgtcctgtttgcaaactccgattgggccttaggttggcgtggttttatcgatggtgctatcgaggagggcacccgcgcagcggttactgtaattgaggaactgcgtcctgcgcctgcggtgcgttcccacctg

SEQ ID NO: 790 - protein, 495 aa, synthetic construct
  REGION 1..495: note = Variant of monoamine oxidase
MTSRDGYQWTPETGLTQGVPSLGVISPPTNIEDTDKDGPWDVIVIGGGYCGLTATRDLTVAGFKTLLLEARDRIGGRSWSSNIDGYPYEMGGTWVHWHQPHVWREITRYKMHNALSPSFNFSRGVNHFQLRTNPTTSTYMTHEAEDELMRSALHKFTNVDGTNGRTVLPFPHDMFYVPEFRKYDEMSYSERIDQIRDELSLNERSSLEAFILLCSGGTLENSSFGEFLHWWAMSGYTYQGCMDCLMSYKFKDGQSAFARRFWEEAAGTGRLGYVFGTPVRSVVNERDAVRVTARDGREFAAKRLVCTIPLNVLSSVHFSPPLSPQRMAAANIGHVNQCVKVHAEVSCKDMRSWSGISYPFNKLAYAIGDGTTPAGNTHIVCLGGAHNHIQPEEDVEATKMAVENMSPGNMDIKRLVFHNWCKDEFAKGAWFFAPPQLLSKSLDERRCRHGNVLFANSDWALGWRGFIDGAIEEGTRAAVTVIEELRPAPAVRSHL

SEQ ID NO: 791 - DNA, 1485 bp, synthetic construct
  misc_feature 1..1485: note = Variant of monoamine oxidase
  source 1..1485: mol_type = other DNA
atgaccagccgcgacggctatcagtggaccccggaaacgggtctgacccagggcgtaccgtccctgggtgtcatttcgccgccgactaacatcgaagataccgataaggacgggccttgggatgtcattgtcattgggggcgggtattgtgggctgaccgcaacccgtgatttaaccgtcgcagggttcaagacgctgctgctggaggcccgtgatcgtattggtggccgctcctggagcagtaacattgacggttacggttatgagatgggtggcacttgggttcattggcatcaatctcacgtgtggcgtgaaatcacgcgttataaaatgcacaacgcgctgtctccatcatttaacttttcacgtggcgtgaatcacttccaactgcgtaccaatccgaccaccagtacgtacatgacgcacgaagcggaggatgaactgctgcgtagcgcattgcataaattcaccaatgtcgacggcactaatggccgtacagtgttgccgttcccacatgatatgttttatgtgccggaatttcgcaagtatgacgaaatgtcatattccgaacgcattgaccagatccgcgacgaactgtctttgaacgaacgctctagtttagaggctttcattttattatgtagcggtggcacctcggaaaactccagctttggtgaatttctgcattggtgggcaatgtcgggttacacgtatcagggctgtatggattgtttaatctcctataaatttaaggatggccagagtgcgttcgcgcgtcgcttctgggaagaagccgctggcactggccgtctgggctatgtctttggttgtccggtgcgttctgtggtgaacgaacgcgacgcagtacgtgttaccgcacgtgacggtcgcgaattcgcagcgaaacgtttggtttgcacgattccgctgaacgtattgagttctgttcattttagcccaccactgtccccgcaacgcatggccgctgcgaacattggccatgttaaccagtgcgtcaaagtgcatgcggaagtcagttgtccggatatgcgttcatggtcgggtatctcctatccgttcaacaaattagcctacgctatcggcgatggcacgaccccagcgggtaatacgcatattgtgtgccttgggggggcccataatcatatccagccggaagaggacgtggaagcaacgaagatggccgttgaaaacatgtcgcctgggaatatggatatcaaacgtctggtcttccacaactggtgcaaggatgaatttgccaaaggcgcgtggttcttcgcccctccacagctgctgtcaaagagcctggatgaactgcgctgccgtcacggtaatgtcctgtttgcaaactccgattgggccttaggttggcgtggttttatcgatggtgctatcgaggagggcacccgcgcagcggttactgtaattgaggaactgcgtcctgcgcctgcggtgcgttcccacctg

SEQ ID NO: 792 - protein, 495 aa, synthetic construct
  REGION 1..495: note = Variant of monoamine oxidase
MTSRDGYQWTPETGLTQGVPSLGVISPPTNIEDTDKDGPWDVIVIGGGYCGLTATRDLTVAGFKTLLLEARDRIGGRSWSSNIDGYGYEMGGTWVHWHQSHVWREITRYKMHNALSPSFNFSRGVNHFQLRTNPTTSTYMTHEAEDELLRSALHKFTNVDGTNGRTVLPFPHDMFYVPEFRKYDEMSYSERIDQIRDELSLNERSSLEAFILLCSGGTSENSSFGEFLHWWAMSGYTYQGCMDCLISYKFKDGQSAFARRFWEEAAGTGRLGYVFGCPVRSVVNERDAVRVTARDGREFAAKRLVCTIPLNVLSSVHFSPPLSPQRMAAANIGHVNQCVKVHAEVSCPDMRSWSGISYPFNKLAYAIGDGTTPAGNTHIVCLGGAHNHIQPEEDVEATKMAVENMSPGNMDIKRLVFHNWCKDEFAKGAWFFAPPQLLSKSLDELRCRHGNVLFANSDWALGWRGFIDGAIEEGTRAAVTVIEELRPAPAVRSHL

SEQ ID NO: 793 - DNA, 1485 bp, synthetic construct
  misc_feature 1..1485: note = Variant of monoamine oxidase
  source 1..1485: mol_type = other DNA
atgaccagccgcgacggctatcagtggaccccggaaacgggtctgacccagggcgtaccgtccctgggtgtcatttcgccgccgactaacatcgaagataccgataaggacgggccttgggatgtcattgtcattgggggcgggtattgtgggctgaccgcaacccgtgatttaaccgtcgcagggttcaagacgctgctgctggaggcccgtgatcgtattggtggccgctcctggagcagtaatattgacggttacccgtatgagatgggtggcacttgggttcattggcatcaatcgcacgtgtggcgtgaaatcacgcgttataaaatgcacaacgcgctgtctccatcatttaacttttcacgtggcgtgaatcacttccaactgcgtaccaatccgaccaccagtacgtacatgacgcacgaagcggaggatgaactgctgcgtagcgcattgcataaattcaccaatgtcgacggcactaatggccgtacagtgttgccgttcccacatgatatgttttatgtgccggaatttcgcaagtatgacgaaatgtcatattccgaacgcattgaccagatccgcgacgatctgtctttgaacgaacgctctagtttagaggctttcattttattatgtagcggtggcaccctggaaaactccagctttggtgaatttctgcattggtgggcaatgtcgggttacacgtatcagggctgtatggattgtttaatgtcctataaatttaaggatggccagagtgcgttcgcgcgtcgcttctgggaagaagccgctggcactggccgtctgggctatgtctttggttgtccggtgcgttctgtggtgaacgaacgcgacgcagtacgtgttaccgcacgtgacggtcgcgaattcgcagcgaaacgtttggtttgcacgattccgctgaacgtattgagttctgttcattttagcccaccactgtccccgcaacgcatggccgctgcgaacattggccatgttaaccagtgcgtcaaagtgcatgcggaagtcagttgcccagatatgcgttcatggtcgggtatctcctatccgttcaacaaattagcctacgctatcggcgatggcacgaccccagcgggtaatacgcatattgtgtgccttgggggggcccataatcatatccagccggaagaggacgtggaagcaacgaagatggccgttgaaaacatgtcgcctgggaatatggatatcaaacgtctggtcttccacaactggtgcaaggatgaatttgccaaaggcgcgtggttcttcgcccctccacagctgctgtcaaagagcctggatgaactgcgctgccgtcacggtaatgtcctgtttgcaaactccgattgggccttaggttggcgtggttttatcgatggtgctatcgaggagggcacccgcgcagcggttactgtaattgaggaactgcgtcctgcgcctgcggtgcgttcccacctg

SEQ ID NO: 794 - protein, 495 aa, synthetic construct
  REGION 1..495: note = Variant of monoamine oxidase
MTSRDGYQWTPETGLTQGVPSLGVISPPTNIEDTDKDGPWDVIVIGGGYCGLTATRDLTVAGFKTLLLEARDRIGGRSWSSNIDGYPYEMGGTWVHWHQSHVWREITRYKMHNALSPSFNFSRGVNHFQLRTNPTTSTYMTHEAEDELLRSALHKFTNVDGTNGRTVLPFPHDMFYVPEFRKYDEMSYSERIDQIRDDLSLNERSSLEAFILLCSGGTLENSSFGEFLHWWAMSGYTYQGCMDCLMSYKFKDGQSAFARRFWEEAAGTGRLGYVFGCPVRSVVNERDAVRVTARDGREFAAKRLVCTIPLNVLSSVHFSPPLSPQRMAAANIGHVNQCVKVHAEVSCPDMRSWSGISYPFNKLAYAIGDGTTPAGNTHIVCLGGAHNHIQPEEDVEATKMAVENMSPGNMDIKRLVFHNWCKDEFAKGAWFFAPPQLLSKSLDELRCRHGNVLFANSDWALGWRGFIDGAIEEGTRAAVTVIEELRPAPAVRSHL

SEQ ID NO: 795 - DNA, 1485 bp, synthetic construct
  misc_feature 1..1485: note = Variant of monoamine oxidase
  source 1..1485: mol_type = other DNA
atgaccagccgcgacggctatcagtggaccccggaaacgggtctgacccagggcgtaccgtccctgggtgtcatttcgccgccgactaacatcgaagataccgataaggacgggccttgggatgtcattgtcattgggggcgggtattgtgggctgaccgcaacccgtgatttaaccgtcgcagggttcaagacgctgctgctggaggcccgtgatcgtattggtggccgctcctggagcagtaacattgacggttacctgtatgagatgggtggcacttgggttcattggcatcaatctcacgtgtggcgtgaaatcacgcgttataaaatgcacaacgcgctgtctccatcatttaacttttcacgtggcgtgaatcacttccaactgcgtaccaatccgaccaccagtacgtacatgacgcacgaagcggaggatgaactgctgcgtagcgcattgcataaattcaccaatgtcgacggcactaatggccgtacagtgttgccgttcccacatgatatgttttatgtgccggaatttcgcaagtatgacgaaatgtcatattccgaacgcattgaccagatccgcgacgaactgtctttgaacgaacgctctagtttagaggctttcattttattatgtagcggtggcggcctggaaaactccagctttggtgaatttctgcattggtgggcaatgtcgggttacacgtatcagggctgtatggattgtttaatctcctataaatttaaggatggccagagtgcgttcgcgcgtcgcttctgggaagaagccgctggcactggccgtctgggctatgtctttggttgtccggtgcgttctgtggtgaacgaacgcgacgcagtacgtgttaccgcacgtgacggtcgcgaattcgcagcgaaacgtttggtttgcacgattccgctgaacgtattgagttctgttcattttagcccaccactgtccccgcaacgcatggccgctgcgaacattggccatgttaaccagtgcgtcaaagtgcatgcggaagtcagttgtccggatatgcgttcatggtcgggtatctcctatccgttcaacaaattagcctacgctatcggcgatggcacgaccccagcgggtaatacgcatattgtgtgccttgggggggcccataatcatatccagccggaagaggacgtggaagcaacgaagatggccgttgaaaacatgtcgcctgggaatatggatatcaaacgtctggtcttccacaactggtgcaaggatgaatttgccaaaggcgcgtggttcttcgcccctccacagctgctgtcaaagagcctggatgaactgcgctgccgtcacggtaatgtcctgtttgcaaactccgattgggccttaggttggcgtggttttatcgatggtgctatcgaggagggcacccgcgcagcggttactgtaattgaggaactgcgtcctgcgcctgcggtgcgttcccacctg

SEQ ID NO: 796 - protein, 495 aa, synthetic construct
  REGION 1..495: note = Variant of monoamine oxidase
MTSRDGYQWTPETGLTQGVPSLGVISPPTNIEDTDKDGPWDVIVIGGGYCGLTATRDLTVAGFKTLLLEARDRIGGRSWSSNIDGYLYEMGGTWVHWHQSHVWREITRYKMHNALSPSFNFSRGVNHFQLRTNPTTSTYMTHEAEDELLRSALHKFTNVDGTNGRTVLPFPHDMFYVPEFRKYDEMSYSERIDQIRDELSLNERSSLEAFILLCSGGGLENSSFGEFLHWWAMSGYTYQGCMDCLISYKFKDGQSAFARRFWEEAAGTGRLGYVFGCPVRSVVNERDAVRVTARDGREFAAKRLVCTIPLNVLSSVHFSPPLSPQRMAAANIGHVNQCVKVHAEVSCPDMRSWSGISYPFNKLAYAIGDGTTPAGNTHIVCLGGAHNHIQPEEDVEATKMAVENMSPGNMDIKRLVFHNWCKDEFAKGAWFFAPPQLLSKSLDELRCRHGNVLFANSDWALGWRGFIDGAIEEGTRAAVTVIEELRPAPAVRSHL

SEQ ID NO: 797 - DNA, 1485 bp, synthetic construct
  misc_feature 1..1485: note = Variant of monoamine oxidase
  source 1..1485: mol_type = other DNA
atgaccagccgcgacggctatcagtggaccccggaaacgggtctgacccagggcgtaccgtccctgggtgtcatttcgccgccgactaacatcgaagataccgataaggacgggccttgggatgtcattgtcattgggggcgggtattgtgggctgaccgcaacccgtgatttaaccgtcgcagggttcaagacgctgctgctggaggcccgtgatcgtattggtggccgctcctggagcagtaatattgacggttacccgtatgagatgggtggcacttgggttcattggcatcaatcgcacgtgtggcgtgaaatcacgcgttataaaatgcacaacgcgctgtctccatcatttaacttttcacgtggcgtgaatcacttccaactgcgtaccaatccgaccaccagtacgtacatgacgcacgaagcggaggatgaactgatgcgtagcgcattgcataaattcaccaatgtcgacggcactaatggccgtacagtgttgccgttcccacatgatatgttttatgtgccggaatttcgcaagtatgacgaaatgtcatattccgaacgcattgaccagatccgcgacgatctgtctttgaacgaacgctctagtttagaggctttcattttattatgtagcggtggcaccctggaaaactccagctttggtgaatttctgcattggtgggcaatgtcgggttacacgtatcagggctgtatggattgtttaatttcctataaatttaaggatggccagagtgcgttcgcgcgtcgcttctgggaagaagccgctggcactggccgtctgggctatgtctttggtactccggtgcgttctgtggtgaacgaacgcgacgcagtacgtgttaccgcacgtgacggtcgcgaattcgcagcgaaacgtttggtttgcacgattccgctgaacgtattgagttctgttcattttagcccaccactgtccccgcaacgcatggccgctgcgaacattggccatgttaaccagtgcgtcaaagtgcatgcggaagtcagtaacaaggatatgcgttcatggtcgggtatctcctatccgttcaacaaattagcctacgctatcggcgatggcacgaccccagcgggtaatacgcatattgtgtgccttgggggggcccataatcatatccagccggaagaggacgtggaagcaacgaagatggccgttgaaaacatgtcgcctgggaatatggatatcaaacgtctggtcttccacaactggtgcaaggatgaatttgccaaaggcgcgtggttcttcgcccctccacagctgctgtcaaagagcctggatgaactgcgctgtcgtcacggtaatgtcctgtttgcaaactccgattgggccttaggttggcgtggttttatcgatggtgctatcgaggagggcacccgcgcagcggttactgtaattgaggaactgcgtcctgcacctgcggtgcgttcccacctg

SEQ ID NO: 798 - protein, 495 aa, synthetic construct
  REGION 1..495: note = Variant of monoamine oxidase
MTSRDGYQWTPETGLTQGVPSLGVISPPTNIEDTDKDGPWDVIVIGGGYCGLTATRDLTVAGFKTLLLEARDRIGGRSWSSNIDGYPYEMGGTWVHWHQSHVWREITRYKMHNALSPSFNFSRGVNHFQLRTNPTTSTYMTHEAEDELMRSALHKFTNVDGTNGRTVLPFPHDMFYVPEFRKYDEMSYSERIDQIRDDLSLNERSSLEAFILLCSGGTLENSSFGEFLHWWAMSGYTYQGCMDCLISYKFKDGQSAFARRFWEEAAGTGRLGYVFGTPVRSVVNERDAVRVTARDGREFAAKRLVCTIPLNVLSSVHFSPPLSPQRMAAANIGHVNQCVKVHAEVSNKDMRSWSGISYPFNKLAYAIGDGTTPAGNTHIVCLGGAHNHIQPEEDVEATKMAVENMSPGNMDIKRLVFHNWCKDEFAKGAWFFAPPQLLSKSLDELRCRHGNVLFANSDWALGWRGFIDGAIEEGTRAAVTVIEELRPAPAVRSHL

SEQ ID NO: 799 - DNA, 1485 bp, synthetic construct
  misc_feature 1..1485: note = Variant of monoamine oxidase
  source 1..1485: mol_type = other DNA
atgaccagccgcgacggctatcagtggaccccggaaacgggtctgacccagggcgtaccgtccctgggtgtcatttcgccgccgactaacatcgaagataccgataaggacgggccttgggatgtcattgtcattgggggcgggtattgtgggctgaccgcaacccgtgatttaaccgtcgcagggttcaagacgctgctgctggaggcccgtgatcgtattggtggccgctcctggagcagtaatattgacggttacccgtatgagatgggtggcacttgggttcattggcatcaatcgcacgtgtggcgtgaaatcacgcgttataaaatgcacaacgcgctgtctccatcatttaacttttcacgtggcgtgaatcacttccaactgcgtaccaatccgaccaccagtacgtacatgacgcacgaagcgtcggatgaactgatgcgtagcgcattgcataaattcaccaatgtcgacggcactaatggccgtacagtgttgccgttcccacatgatatgttttatgtgccggaatttcgcaagtatgacgaaatgtcatattccgaacgcattgaccagatccgcgacgaactgtctttgaacgaacgcactagtttagaggctttcattttattatgtagcggtggcaccctggaaaactccagctttggtgaatttctgcattggtgggcaatgtcgggttacacgtatcagggctgtatggattgtttaatctcctataaatttaaggatggccagagtgcgttcgcgcgtcgcttctgggaagaagccgctggcactggccgtctgggctatgtctttggtactccggtgcgttctgtggtgaacgaacgcgacgcagtacgtgttaccgcacgtgacggtcgcgaattcgcagcgaaacgtttggtttgcacgattccgctgaacgtattgagttctgttcattttagcccaccactgtccccgcaacgcatggccgctgcgaacattggccatgttaaccagtgcgtcaaagtgcatgcggaagtcagttgcccagatatgcgttcatggtcgggtatctcctatccgttcaacaaattagcctacgctatcggcgatggcacgaccccagcgggtaatacgcatattgtgtgccttgggggggcccataatcatatccagccggaagaggacgtggaagcaacgaagatggccgttgaaaacatgtcgcctgggaatatggatatcaaacgtctggtcttccacaactggtgcaaggatgaatttgccaaaggcgcgtggttcttcgcccctccacagctgctgtcaaagagcctggatgaacgtcgctgtcgtcacggtaatgtcctgtttgcaaactccgattgggccttaggttggcgtggttttatcgatggtgctatcgaggagggcacccgcgcagcggttactgtaattgaggaactgcgtcctgcgcctgcggtgcgttcccacctg

SEQ ID NO: 800 - protein, 495 aa, synthetic construct
  REGION 1..495: note = Variant of monoamine oxidase
MTSRDGYQWTPETGLTQGVPSLGVISPPTNIEDTDKDGPWDVIVIGGGYCGLTATRDLTVAGFKTLLLEARDRIGGRSWSSNIDGYPYEMGGTWVHWHQSHVWREITRYKMHNALSPSFNFSRGVNHFQLRTNPTTSTYMTHEASDELMRSALHKFTNVDGTNGRTVLPFPHDMFYVPEFRKYDEMSYSERIDQIRDELSLNERTSLEAFILLCSGGTLENSSFGEFLHWWAMSGYTYQGCMDCLISYKFKDGQSAFARRFWEEAAGTGRLGYVFGTPVRSVVNERDAVRVTARDGREFAAKRLVCTIPLNVLSSVHFSPPLSPQRMAAANIGHVNQCVKVHAEVSCPDMRSWSGISYPFNKLAYAIGDGTTPAGNTHIVCLGGAHNHIQPEEDVEATKMAVENMSPGNMDIKRLVFHNWCKDEFAKGAWFFAPPQLLSKSLDERRCRHGNVLFANSDWALGWRGFIDGAIEEGTRAAVTVIEELRPAPAVRSHL

SEQ ID NO: 801 - DNA, 1485 bp, synthetic construct
  misc_feature 1..1485: note = Variant of monoamine oxidase
  source 1..1485: mol_type = other DNA
atgaccagccgcgacggctatcagtggaccccggaaacgggtctgacccagggcgtaccgtccctgggtgtcatttcgccgccgactaacatcgaagataccgataaggacgggccttgggatgtcattgtcattgggggcgggtattgtgggctgaccgcaacccgtgatttaaccgtcgcagggttcaagacgctgctgctggaggcccgtgatcgtattggtggccgctcctggagcagtaatattgacggttacccgtatgagatgggtggcacttgggttcattggcatcaatcgcacgtgtggcgtgaaatcacgcgttataaaatgcacaacgcgctgtctccatcatttaacttttcacgtggcgtgaatcacttccaactgcgtaccaatccgaccaccagtacgtacatgacgcacgaagcggaggatgaactgctgcgtagcgcattgcataaattcaccaatgtcgacggcactaatggccgtacagtgttgccgttcccacatgatatgttttatgtgccggaatttcgcaagtatgacgaaatgtcatattccgaacgcattgaccagatccgcgacgaactgtctttgaacgaacgctctagtttagaggctttcattttattatgtagcggtggcaccctggaaaactccagctttggtgaatttctgcattggtgggcaatgtcgggttacacgtatcagggctgtatggattgtttaatttcctataaatttaaggatggccagagtgcgttcgcgcgtcgcttctgggaagaagccgctggcactggccgtctgggctatgtctttggttgtccggtgcgttctgtggtgaacgaacgcgacgcagtacgtgttaccgcacgtgacggtcgcgaattcgcagcgaaacgtttggtttgcacgattccgctgaacgtattgagttctgttcattttagcccaccactgtccccgcaacgcatggccgctgcgaacattggccatgttaaccagtgcgtcaaagtgcatgcggaagtcagtaacaaggatatgcgttcatggtcgggtatctcctatccgttcaacaaattagcctacgctatcggcgatggcacgaccccagcgggtaatacgcatattgtgtgccttgggggggcccataatcatatccagccggaagaggacgtggaagcaacgaagatggccgttgaaaacatgtcgcctgggaatatggatatcaaacgtctggtcttccacaactggtgcaaggatgaatttgccaaaggcgcgtggttcttcgcccctccacagctgctgtcaaagagcctggatgaacgtcgctgtcgtcacggtaatgtcctgtttgcaaactccgattgggccttaggttggcgtggttttatcgatggtgctatcgaggagggcacccgcgcagcggttactgtaattgaggaactgcgtcctgcgcctgcggtgcgttcccacctg

SEQ ID NO: 802 - protein, 495 aa, synthetic construct
  REGION 1..495: note = Variant of monoamine oxidase
MTSRDGYQWTPETGLTQGVPSLGVISPPTNIEDTDKDGPWDVIVIGGGYCGLTATRDLTVAGFKTLLLEARDRIGGRSWSSNIDGYPYEMGGTWVHWHQSHVWREITRYKMHNALSPSFNFSRGVNHFQLRTNPTTSTYMTHEAEDELLRSALHKFTNVDGTNGRTVLPFPHDMFYVPEFRKYDEMSYSERIDQIRDELSLNERSSLEAFILLCSGGTLENSSFGEFLHWWAMSGYTYQGCMDCLISYKFKDGQSAFARRFWEEAAGTGRLGYVFGCPVRSVVNERDAVRVTARDGREFAAKRLVCTIPLNVLSSVHFSPPLSPQRMAAANIGHVNQCVKVHAEVSNKDMRSWSGISYPFNKLAYAIGDGTTPAGNTHIVCLGGAHNHIQPEEDVEATKMAVENMSPGNMDIKRLVFHNWCKDEFAKGAWFFAPPQLLSKSLDERRCRHGNVLFANSDWALGWRGFIDGAIEEGTRAAVTVIEELRPAPAVRSHL

SEQ ID NO: 803 - DNA, 1485 bp, synthetic construct
  misc_feature 1..1485: note = Variant of monoamine oxidase
  source 1..1485: mol_type = other DNA
atgaccagccgcgacggctatcagtggaccccggaaacgggtctgacccagggcgtaccgtccctgggtgtcatttcgccgccgactaacatcgaagataccgataaggacgggccttgggatgtcattgtcattgggggcgggtattgtgggctgaccgcaacccgtgatttaaccgtcgcagggttcaagacgctgctgctggaggcccgtgatcgtattggtggccgctcctggagcagtaatattgacggttacccgtatgagatgggtggcacttgggttcattggcatcaatcgcacgtgtggcgtgaaatcacgcgttataaaatgcacaacgcgctgtctccatcatttaacttttcacgtggcgtgaatcacttccaactgcgtaccaatccgaccaccagtacgtacatgacgcacgaagcgtcggatgaactgatgcgtagcgcattgcataaattcaccaatgtcgacggcactaatggccgtacagtgttgccgttcccacatgatatgttttatgtgccggaatttcgcaagtatgacgaaatgtcatattccgaacgcattgaccagatccgcgacgatctgtctttgaacgaacgctctagtttagaggctttcattttattatgtagcggtggcaccctggaaaactccagctttggtgaatttctgcattggtgggcaatgtcgggttacacgtatcagggctgtattgattgtttaatgtcctataaatttaaggatggccagagtgcgttcgcgcgtcgcttctgggaagaagccgctggcactggccgtctgggctatgtctttggttgcccggtgcgttctgtggtgaacgaacgcgacgcagtacgtgttaccgcacgtgacggtcgcgaattcgcagcgaaacgtttggtttgcacgattccgctgaacgtattgagttctgttcattttagcccaccactgtccccgcaacgcatggccgctgcgaacattggccatgttaaccagtgcgtcaaagtgcatgcggaagtcagttgcaaggatatgcgttcatggtcgggtatctcctatccgttcaacaaattagcctacgctatcggcgatggcacgaccccagcgggtaatacgcatattgtgtgccttgggggggcccataatcatatccagccggaagaggacgtggaagcaacgaagatggccgttgaaaacatgtcgcctgggaatatggatatcaaacgtctggtcttccacaactggtgcaaggatgaatttgccaaaggcgcgtggttcttcgcccctccacagctgctgtcaaagagcctggatgaactgcgctgtcgtcacggtaatgtcctgtttgcaaactccgattgggccttaggttggcgtggttttatcgatggtgctatcgaggagggcacccgcgcagcggttactgtaattgaggaactgcgtcctgcgcctgcggtgcgttcccacctg

SEQ ID NO: 804 - protein, 495 aa, synthetic construct
  REGION 1..495: note = Variant of monoamine oxidase
MTSRDGYQWTPETGLTQGVPSLGVISPPTNIEDTDKDGPWDVIVIGGGYCGLTATRDLTVAGFKTLLLEARDRIGGRSWSSNIDGYPYEMGGTWVHWHQSHVWREITRYKMHNALSPSFNFSRGVNHFQLRTNPTTSTYMTHEASDELMRSALHKFTNVDGTNGRTVLPFPHDMFYVPEFRKYDEMSYSERIDQIRDDLSLNERSSLEAFILLCSGGTLENSSFGEFLHWWAMSGYTYQGCIDCLMSYKFKDGQSAFARRFWEEAAGTGRLGYVFGCPVRSVVNERDAVRVTARDGREFAAKRLVCTIPLNVLSSVHFSPPLSPQRMAAANIGHVNQCVKVHAEVSCKDMRSWSGISYPFNKLAYAIGDGTTPAGNTHIVCLGGAHNHIQPEEDVEATKMAVENMSPGNMDIKRLVFHNWCKDEFAKGAWFFAPPQLLSKSLDELRCRHGNVLFANSDWALGWRGFIDGAIEEGTRAAVTVIEELRPAPAVRSHL

SEQ ID NO: 805 - DNA, 1485 bp, synthetic construct
  misc_feature 1..1485: note = Variant of monoamine oxidase
  source 1..1485: mol_type = other DNA
atgaccagccgcgacggctatcagtggaccccggaaacgggtctgacccagggcgtaccgtccctgggtgtcatttcgccgccgactaacatcgaagataccgataaggacgggccttgggatgtcattgtcattgggggcgggtattgtgggctgaccgcaacccgtgatttaaccgtcgcagggttcaagacgctgctgctggaggcccgtgatcgtattggtggccgctcctggagcagtaatattgacggttacccgtatgagatgggtggcacttgggttcattggcatcaaccgcacgtgtggcgtgaaatcacgcgttataaaatgcacaacgcgctgtctccatcatttaacttttcacgtggcgtgaatcacttccaactgcgtaccaatccgaccaccagtacgtacatgacgcacgaagcgggggatgaactgctgcgtagcgcattgcataaattcaccaatgtcgacggcactaatggccgtacagtgttgccgttcccacatgatatgttttatgtgccggaatttcgcaagtatgacgaaatgtcatattccgaacgcattgaccagatccgcgacgaactgtctttgaacgaacgctctagtttagaggctttcattttattatgtagcggtggcaccctggaaaactccagctttggtgaatttctgcattggtgggcaatgtcgggttacacgtatcagggctgtatggattgtttaatctcctataaatttaaggatggccagagtgcgttcgcgcgtcgcttctgggaagaagccgctggcactggccgtctgggctatgtctttggttgtccggtgcgttctgtggtgaacgaacgcgacgcagtacgtgttaccgcacgtgacggtcgcgaattcgcagcgaaacgtttggtttgcacgattccgctgaacgtattgagttctgttcattttagcccaccactgtccccgcaacgcatggccgctgcgaacattggccatgttaaccagtgcgtcaaagtgcatgcggaagtcagttgcaaggatatgcgttcatggtcgggtatctcctatccgttcaacaaattagcctacgctatcggcgatggcacgaccccagcgggtaatacgcatattgtgtgccttgggggggcccataatcatatccagccggaagaggacgtggaagcaacgaagatggccgttgaaaacatgtcgcctgggaatatggatatcaaacgtctggtcttccacaactggtgcaaggatgaatttgccaaaggcgcgtggttcttcgcccctccacagctgctgtcaaagagcctggatgaactgcgctgccgtcacggtaatgtcctgtttgcaaactccgattgggccttaggttggcgtggttttatcgatggtgctatcgaggagggcacccgcgcagcggttactgtaattgaggaactgcgtcctgcgcctgcggtgcgttcccacctg

SEQ ID NO: 806 - protein, 495 aa, synthetic construct
  REGION 1..495: note = Variant of monoamine oxidase
MTSRDGYQWTPETGLTQGVPSLGVISPPTNIEDTDKDGPWDVIVIGGGYCGLTATRDLTVAGFKTLLLEARDRIGGRSWSSNIDGYPYEMGGTWVHWHQPHVWREITRYKMHNALSPSFNFSRGVNHFQLRTNPTTSTYMTHEAGDELLRSALHKFTNVDGTNGRTVLPFPHDMFYVPEFRKYDEMSYSERIDQIRDELSLNERSSLEAFILLCSGGTLENSSFGEFLHWWAMSGYTYQGCMDCLISYKFKDGQSAFARRFWEEAAGTGRLGYVFGCPVRSVVNERDAVRVTARDGREFAAKRLVCTIPLNVLSSVHFSPPLSPQRMAAANIGHVNQCVKVHAEVSCKDMRSWSGISYPFNKLAYAIGDGTTPAGNTHIVCLGGAHNHIQPEEDVEATKMAVENMSPGNMDIKRLVFHNWCKDEFAKGAWFFAPPQLLSKSLDELRCRHGNVLFANSDWALGWRGFIDGAIEEGTRAAVTVIEELRPAPAVRSHL

SEQ ID NO: 807 - DNA, 1485 bp, synthetic construct
  misc_feature 1..1485: note = Variant of monoamine oxidase
  source 1..1485: mol_type = other DNA
atgaccagccgcgacggctatcagtggaccccggaaacgggtctgacccagggcgtaccgtccctgggtgtcatttcgccgccgactaacatcgaagataccgataaggacgggccttgggatgtcattgtcattgggggcgggtattgtgggctgaccgcaacccgtgatttaaccgtcgcagggttcaagacgctgctgctggaggcccgtgatcgtattggtggccgctccgcccacagtaatattgacggttacccgtatgagatgggtggcacttgggttcattggcatcaatctcacgtgtggcgtgaaatcacgcgttataaaatgcacaacgcgctgtctccatcatttaacttttcacgtggcgtgaatcacttccaactgcgtaccaatccgaccaccagtacgtacatgacgcacgaagcggaggatgaactgctgcgtagcgcattgcataaattcaccaatgtcgacggcactaatggccgtacagtgttgccgttcccacatgatatgttttatgtgccggaatttcgcaagtatgacgaaatgtcatattccgaacgcattgaccagatccgcgacgaactgtctttgaacgaacgctctagtttagaggctttcattttattatgtagcggtggcaccctggaaaactccagctttggtgaatttctgcattggtgggcaatgtcgggttacacgtaccagggctgtatggattgtttaatctcctataaatttaaggatggccagagtgcgttcgcgcgtcgcttctgggaagaagccgctggcactggccgtctgggctatgtctttggttgtccggtgcgttctgtggtgaacgaacgcgacgcagtacgtgttaccgcacgtgacggtcgcgaattcgcagcgaaacgtttggtttgcacgattccgctgaacgtattgagttctgttcattttagcccaccactgtccccgcaacgcatggccgctgcgaacattggccatgttaaccagtgcgtcaaagtgcatgcggaagtcagttgtccggatatgcgttcatggtcgggtatctcctatccgttcaacaaattagcctacgctatcggcgatggcacgaccccagcgggtaatacgcatattgtgtgccttgggggggcccataatcatatccagccggaagaggacgtggaagcaacgaagatggccgttgaaaacatgtcgcctgggaatatggatatcaaacgtctggtcttccacaactggtgcaaggatgaatttgccaaaggcgcgtggttcttcgcccctccacagctgctgtcaaagagcctggatgaactgcgctgccgtcacggtaatgtcctgtttgcaaactccgattgggccttaggttggcgtggttttatcgatggtgctatcgaggagggcacccgcgcagcggttactgtaattgaggaactgcgtcctgcgcctgcggtgcgttcccacctg

SEQ ID NO: 808 - protein, 495 aa, synthetic construct
  REGION 1..495: note = Variant of monoamine oxidase
MTSRDGYQWTPETGLTQGVPSLGVISPPTNIEDTDKDGPWDVIVIGGGYCGLTATRDLTVAGFKTLLLEARDRIGGRSAHSNIDGYPYEMGGTWVHWHQSHVWREITRYKMHNALSPSFNFSRGVNHFQLRTNPTTSTYMTHEAEDELLRSALHKFTNVDGTNGRTVLPFPHDMFYVPEFRKYDEMSYSERIDQIRDELSLNERSSLEAFILLCSGGTLENSSFGEFLHWWAMSGYTYQGCMDCLISYKFKDGQSAFARRFWEEAAGTGRLGYVFGCPVRSVVNERDAVRVTARDGREFAAKRLVCTIPLNVLSSVHFSPPLSPQRMAAANIGHVNQCVKVHAEVSCPDMRSWSGISYPFNKLAYAIGDGTTPAGNTHIVCLGGAHNHIQPEEDVEATKMAVENMSPGNMDIKRLVFHNWCKDEFAKGAWFFAPPQLLSKSLDELRCRHGNVLFANSDWALGWRGFIDGAIEEGTRAAVTVIEELRPAPAVRSHL

SEQ ID NO: 809 - DNA, 1485 bp, synthetic construct
  misc_feature 1..1485: note = Variant of monoamine oxidase
  source 1..1485: mol_type = other DNA
atgaccagccgcgacggctatcagtggaccccggaaacgggtctgacccagggcgtaccgtccctgggtgtcatttcgccgccgactaacatcgaagataccgataaggacgggccttgggatgtcattgtcattgggggcgggtattgtgggctgaccgcaacccgtgatttaaccgtcgcagggttcaagacgctgctgctggaggcccgtgatcgtattggtggccgctcctgggtgagtaatattgacggttacccgtatgagatgggtggcacttgggttcattggcatcaatctcacgtgtggcgtgaaatcacgcgttataaaatgcacaacgcgctgtctccatcatttaacttttcacgtggcgtgaatcacttccaactgcgtaccaatccgaccaccagtacgtacatgacgcacgaagcggaggatgaactgctgcgtagcgcattgcataaattcaccaatgtcgacggcactaatggccgtacagtgttgccgttcccacatgatatgttttatgtgccggaatttcgcaagtatgacgaaatgtcatattccgaacgcattgaccagatccgcgacgaactgtctttgaacgaacgctctagtttagaggctttcattttattatgtagcggtggcaccctggaaaactccagctttggtgaatttctgcattggtgggcaatgtcgggttacacgcgtcagggctgtatggattgtttaatctcctataaatttaaggatggccagagtgcgttcgcgcgtcgcttctgggaagaagccgctggcactggccgtctgggctatgtctttggttgtccggtgcgttctgtggtgaacgaacgcgacgcagtacgtgttaccgcacgtgacggtcgcgaattcgcagcgaaacgtttggtttgcacgattccgctgaacgtattgagttctgttcattttagcccaccactgtccccgcaacgcatggccgctgcgaacggcggccatgttaaccagtgcgtcaaagtgcatgcggaagtcagttgtccggatatgcgttcatggtcgggtatctcctatccgttcaacaaattagcctacgctatcggcgatggcacgaccccagcgggtaatacgcatattgtgtgccttgggggggcccataatcatatccagccggaagaggacgtggaagcaacgaagatggccgttgaaaacatgtcgcctgggaatatggatatcaaacgtctggtcttccacaactggtgcaaggatgaatttgccaaaggcgcgtggttcttcgcccctccacagctgctgtcaaagagcctggatgaactgcgctgccgtcacggtaatgtcctgtttgcaaactccgattgggccttaggttggcgtggttttatcgatggtgctatcgaggagggcacccgcgcagcggttactgtaattgaggaactgcgtcctgcgcctgcggtgcgttcccacctg

SEQ ID NO: 810 - protein, 495 aa, synthetic construct
  REGION 1..495: note = Variant of monoamine oxidase
MTSRDGYQWTPETGLTQGVPSLGVISPPTNIEDTDKDGPWDVIVIGGGYCGLTATRDLTVAGFKTLLLEARDRIGGRSWVSNIDGYPYEMGGTWVHWHQSHVWREITRYKMHNALSPSFNFSRGVNHFQLRTNPTTSTYMTHEAEDELLRSALHKFTNVDGTNGRTVLPFPHDMFYVPEFRKYDEMSYSERIDQIRDELSLNERSSLEAFILLCSGGTLENSSFGEFLHWWAMSGYTRQGCMDCLISYKFKDGQSAFARRFWEEAAGTGRLGYVFGCPVRSVVNERDAVRVTARDGREFAAKRLVCTIPLNVLSSVHFSPPLSPQRMAAANGGHVNQCVKVHAEVSCPDMRSWSGISYPFNKLAYAIGDGTTPAGNTHIVCLGGAHNHIQPEEDVEATKMAVENMSPGNMDIKRLVFHNWCKDEFAKGAWFFAPPQLLSKSLDELRCRHGNVLFANSDWALGWRGFIDGAIEEGTRAAVTVIEELRPAPAVRSHL

SEQ ID NO: 811 - DNA, 1485 bp, synthetic construct
  misc_feature 1..1485: note = Variant of monoamine oxidase
  source 1..1485: mol_type = other DNA
atgaccagccgcgacggctatcagtggaccccggaaacgggtctgacccagggcgtaccgtccctgggtgtcatttcgccgccgactaacatcgaagataccgataaggacgggccttgggatgtcattgtcattgggggcgggtattgtgggctgaccgcaacccgtgatttaaccgtcgcagggttcaagacgctgctgctggaggcccgtgatcgtattggtggccgctcctggagcagtaatattgacggttacccgtatgagatgggtggcacttgggttcattggcatcaatctcacgtgtggcgtgaaatcacgcgttataaaatgcacaacgcgctgtctccatcatttaacttttcacgtggcgtgaatcacttccaactgcgtaccaatccgaccaccagtacgtacatgacgcacgaagcgtcggatgaactgatgcgtagcgcattgcataaattcaccaatgtcgacggcactaatggccgtacagtgttgccgttcccacatgatatgttttatgtgccggaatttcgcaagtatgacgaaatgtcatattccgaacgcattgaccagatccgcgacgaactgtctttgaacgaacgctctagtttagaggctttcattttattatgtagcggtggcaccctggaaaactccagctttggtgaatttctgcattggtgggcaatgtcgggttacacgtatcagggctgtatggattgtttaatgtcctataaatttaaggatggccagagtgcgttcgcgcgtcgcttctgggaagaagccgctggcactggccgtctgggctatgtctttggttgcccggtgcgttctgtggtgaacgaacgcgacgcagtacgtgttaccgcacgtgacggtcgcgaattcgcagcgaaacgtttggtttgcacgattccgctgaacgtattgagttctgttcattttagcccaccactgtccccgcaacgcatggccgctgcgaacattggccatgttaaccagtgcgtcaaagtgcatgcggaagtcagttgcccagatatgcgttcatggtcgggtatctcctatccgttcaacaaattagcctacgctatcggcgatggcacgaccccagcgggtaatacgcatattgtgtgccttgggggggcccataatcatatccagccggaagaggacgtggaagcaacgaagatggccgttgaaaacatgtcgcctgggaatatggatatcaaacgtctggtcttccacaactggtgcaaggatgaatttgccaaaggcgcgtggttcttcgcccctccacagctgctgtcaaagagcctggatgaactgcgcgcacgtcacggtaatgtcctgtttgcaaactccgattgggccttaggttggcgtggttttatcgatggtgctatcgaggagggcacccgcgcagcggttactgtaattgaggaactgcgtcctgcgcctgcggtgcgttcccacctg

SEQ ID NO: 812 - protein, 495 aa, synthetic construct
  REGION 1..495: note = Variant of monoamine oxidase
MTSRDGYQWTPETGLTQGVPSLGVISPPTNIEDTDKDGPWDVIVIGGGYCGLTATRDLTVAGFKTLLLEARDRIGGRSWSSNIDGYPYEMGGTWVHWHQSHVWREITRYKMHNALSPSFNFSRGVNHFQLRTNPTTSTYMTHEASDELMRSALHKFTNVDGTNGRTVLPFPHDMFYVPEFRKYDEMSYSERIDQIRDELSLNERSSLEAFILLCSGGTLENSSFGEFLHWWAMSGYTYQGCMDCLMSYKFKDGQSAFARRFWEEAAGTGRLGYVFGCPVRSVVNERDAVRVTARDGREFAAKRLVCTIPLNVLSSVHFSPPLSPQRMAAANIGHVNQCVKVHAEVSCPDMRSWSGISYPFNKLAYAIGDGTTPAGNTHIVCLGGAHNHIQPEEDVEATKMAVENMSPGNMDIKRLVFHNWCKDEFAKGAWFFAPPQLLSKSLDELRARHGNVLFANSDWALGWRGFIDGAIEEGTRAAVTVIEELRPAPAVRSHL

SEQ ID NO: 813 - DNA, 1485 bp, synthetic construct
  misc_feature 1..1485: note = Variant of monoamine oxidase
  source 1..1485: mol_type = other DNA
atgaccagccgcgacggctatcagtggaccccggaaacgggtctgacccagggcgtaccgtccctgggtgtcatttcgccgccgactaacatcgaagataccgataaggacgggccttgggatgtcattgtcattgggggcgggtattgtgggctgaccgcaacccgtgatttaaccgtcgcagggttcaagacgctgctgctggaggcccgtgatcgtattggtggccgctcctggagcagtaatattgacggttacccgtatgagatgggtggcacttgggttcattggcatcaatcgcacgtgtggcgtgaaatcacgcgttataaaatgcacaacgcgctgtctccatcatttaacttttcacgtggcgtgaatcacttccaactgcgtaccaatccgaccaccagtacgtacatgacgcacgaagcggaggatgaactgctgcgtagcgcattgcataaattcaccaatgtcgacggcactaatggccgtacagtgttgccgttcccacatgatatgttttatgtgccggaatttcgcaagtatgacgaaatgtcatattccgaacgcattgaccagatccgcgacgaactgtctttgaacgaacgcactagtttagaggctttcattttattatgtagcggtggcaccctggaaaactccagctttggtgaatttctgcattggtgggcaatgtcgggttacacgtatcagggctgtatggattgtttaatgtcctataaatttaaggatggccagagtgcgttcgcgcgtcgcttctgggaagaagccgctggcactggccgtctgggctatgtctttggttgcccggtgcgttctgtggtgaacgaacgcgacgcagtacgtgttaccgcacgtgacggtcgcgaattcgcagcgaaacgtttggtttgcacgattccgctgaacgtattgagttctgttcattttagcccaccactgtccccgcaacgcatggccgctgcgaacattggccatgttaaccagtgcgtcaaagtgcatgcggaagtcagtaacccagatatgcgttcatggtcgggtatctcctatccgttcaacaaattagcctacgctatcggcgatggcacgaccccagcgggtaatacgcatattgtgtgccttgggggggcccataatcatatccagccggaagaggacgtggaagcaacgaagatggccgttgaaaacatgtcgcctgggaatatggatatcaaacgtctggtcttccacaactggtgcaaggatgaatttgccaaaggcgcgtggttcttcgcccctccacagctgctgtcaaagagcctggatgaactgcgctgtcgtcacggtaatgtcctgtttgcaaactccgattgggccttaggttggcgtggttttatcgatggtgctatcgaggagggcacccgcgcagcggttactgtaattgaggaactgcgtcctgcgcctgcggtgcgttcccacctg

SEQ ID NO: 814 - protein, 495 aa, synthetic construct
  REGION 1..495: note = Variant of monoamine oxidase
MTSRDGYQWTPETGLTQGVPSLGVISPPTNIEDTDKDGPWDVIVIGGGYCGLTATRDLTVAGFKTLLLEARDRIGGRSWSSNIDGYPYEMGGTWVHWHQSHVWREITRYKMHNALSPSFNFSRGVNHFQLRTNPTTSTYMTHEAEDELLRSALHKFTNVDGTNGRTVLPFPHDMFYVPEFRKYDEMSYSERIDQIRDELSLNERTSLEAFILLCSGGTLENSSFGEFLHWWAMSGYTYQGCMDCLMSYKFKDGQSAFARRFWEEAAGTGRLGYVFGCPVRSVVNERDAVRVTARDGREFAAKRLVCTIPLNVLSSVHFSPPLSPQRMAAANIGHVNQCVKVHAEVSNPDMRSWSGISYPFNKLAYAIGDGTTPAGNTHIVCLGGAHNHIQPEEDVEATKMAVENMSPGNMDIKRLVFHNWCKDEFAKGAWFFAPPQLLSKSLDELRCRHGNVLFANSDWALGWRGFIDGAIEEGTRAAVTVIEELRPAPAVRSHL

SEQ ID NO: 815 - DNA, 1485 bp, synthetic construct
  misc_feature 1..1485: note = Variant of monoamine oxidase
  source 1..1485: mol_type = other DNA
atgaccagccgcgacggctatcagtggaccccggaaacgggtctgacccagggcgtaccgtccctgggtgtcatttcgccgccgactaacatcgaagataccgataaggacgggccttgggatgtcattgtcattgggggcgggtattgtgggctgaccgcaacccgtgatttaaccgtcgcagggttcaagacgctgctgctggaggcccgtgatcgtattggtggccgctcctggagcagtaatattgacggttacccgtatgagatgggtggcacttgggttcattggcatcaatcgcacgtgtggcgtgaaatcacgcgttataaaatgcacaacgcgctgtctccatcatttaacttttcacgtggcgtgaatcacttccaactgcgtaccaatccgaccaccagtacgtacatgacgcacgaagcggaggctgaactgctgcgtagcgcattgcataaattcaccaatgtcgacggcactaatggccgtacagtgttgccgttcccacatgatatgttttatgtgccggaatttcgcaagtatgacgaaatgtcatattccgaacgcattgaccagatccgcgacgaactgtctttgaacgaacgctctagtttagaggctttcattttattatgtagcggtggcaccctggaaaactccagctttggtgaatttctgcattggtgggcaatgtcgggttacacgtatcagggctgtatggattgtttaatttcctataaatttaaggatggccagagtgcgttcgcgcgtcgcttctgggaagaagccgctggcactggccgtctgggctatgtctttggttgtccggtgcgttctgtggtgaacgaacgcgacgcagtacgtgttaccgcacgtgacggtcgcgaattcgcagcgaaacgtttggtttgcacgattccgctgaacgtattgagttctgttcattttagcccaccactgtccccgcaacgcatggccgctgcgaacattggccatgttaaccagtgcgtcaaagtgcatgcggaagtcagtgacaaggatatgcgttcatggtcgggtatctcctatccgttcaacaaattagcctacgctatcggcgatggcacgaccccagcgggtaatacgcatattgtgtgccttgggggggcccataatcatatccagccggaagaggacgtggaagcaacgaagatggccgttgaaaacatgtcgcctgggaatatggatatcaaacgtctggtcttccacaactggtgcaaggatgaatttgccaaaggcgcgtggttcttcgcccctccacagctgctgtcaaagagcctggatgaactgcgcgcacgtcacggtaatgtcctgtttgcaaactccgattgggccttaggttggcgtggttttatcgatggtgctatcgaggagggcacccgcgcagcggttactgtaattgaggaactgcgtcctgcgcctgcggtgcgttcccacctg

SEQ ID NO: 816 - protein, 495 aa, synthetic construct
  REGION 1..495: note = Variant of monoamine oxidase
MTSRDGYQWTPETGLTQGVPSLGVISPPTNIEDTDKDGPWDVIVIGGGYCGLTATRDLTVAGFKTLLLEARDRIGGRSWSSNIDGYPYEMGGTWVHWHQSHVWREITRYKMHNALSPSFNFSRGVNHFQLRTNPTTSTYMTHEAEAELLRSALHKFTNVDGTNGRTVLPFPHDMFYVPEFRKYDEMSYSERIDQIRDELSLNERSSLEAFILLCSGGTLENSSFGEFLHWWAMSGYTYQGCMDCLISYKFKDGQSAFARRFWEEAAGTGRLGYVFGCPVRSVVNERDAVRVTARDGREFAAKRLVCTIPLNVLSSVHFSPPLSPQRMAAANIGHVNQCVKVHAEVSDKDMRSWSGISYPFNKLAYAIGDGTTPAGNTHIVCLGGAHNHIQPEEDVEATKMAVENMSPGNMDIKRLVFHNWCKDEFAKGAWFFAPPQLLSKSLDELRARHGNVLFANSDWALGWRGFIDGAIEEGTRAAVTVIEELRPAPAVRSHL

SEQ ID NO: 817 - DNA, 1485 bp, synthetic construct
  misc_feature 1..1485: note = Variant of monoamine oxidase
  source 1..1485: mol_type = other DNA
atgaccagccgcgacggctatcagtggaccccggaaacgggtctgacccagggcgtaccgtccctgggtgtcatttcgccgccgactaacatcgaagataccgataaggacgggccttgggatgtcattgtcattgggggcgggtattgtgggctgaccgcaacccgtgatttaaccgtcgcagggttcaagacgctgctgctggaggcccgtgatcgtattggtggccgctcctggagcagtaatattgacggttacccgtatgagatgggtggcacttgggttcattggcatcaaccgcacgtgtggcgtgaaatcacgcgttataaaatgcacaacgcgctgtctccatcatttaacttttcacgtggcgtgaatcacttccaactgcgtaccaatccgaccaccagtacgtacatgacgcacgaagcggaggatgaactgatgcgtagcgcattgcataaattcaccaatgtcgacggcactaatggccgtacagtgttgccgttcccacatgatatgttttatgtgccggaatttcgcaagtatgacgaaatgtcatattccgaacgcattgaccagatccgcgacgaactgtctttgaacgaacgctctagtttagaggctttcattttattatgtagcggtggcaccctggaaaactccagctttggtgaatttctgcattggtgggcaatgtcgggttacacgtatcagggctgtattgattgtttaatttcctataaatttaaggatggccagagtgcgttcgcgcgtcgcttctgggaagaagccgctggcactggccgtctgggctatgtctttggttgtccggtgcgttctgtggtgaacgaacgcgacgcagtacgtgttaccgcacgtgacggtcgcgaattcgcagcgaaacgtttggtttgcacgattccgctgaacgtattgagttctgttcattttagcccaccactgtccccgcaacgcatggccgctgcgaacattggccatgttaaccagtgcgtcaaagtgcatgcggaagtcagtaacaaggatatgcgttcatggtcgggtatctcctatccgttcaacaaattagcctacgctatcggcgatggcacgaccccagcgggtaatacgcatattgtgtgccttgggggggcccataatcatatccagccggaagaggacgtggaagcaacgaagatggccgttgaaaacatgtcgcctgggaatatggatatcaaacgtctggtcttccacaactggtgcaaggatgaatttgccaaaggcgcgtggttcttcgcccctccacagctgctgtcaaagagcctggatgaactgcgcgcacgtcacggtaatgtcctgtttgcaaactccgattgggccttaggttggcgtggttttatcgatggtgctatcgaggagggcacccgcgcagcggttactgtaattgaggaactgcgtcctgcgcctgcggtgcgttcccacctg

SEQ ID NO: 818 - protein, 495 aa, synthetic construct
  REGION 1..495: note = Variant of monoamine oxidase
MTSRDGYQWTPETGLTQGVPSLGVISPPTNIEDTDKDGPWDVIVIGGGYCGLTATRDLTVAGFKTLLLEARDRIGGRSWSSNIDGYPYEMGGTWVHWHQPHVWREITRYKMHNALSPSFNFSRGVNHFQLRTNPTTSTYMTHEAEDELMRSALHKFTNVDGTNGRTVLPFPHDMFYVPEFRKYDEMSYSERIDQIRDELSLNERSSLEAFILLCSGGTLENSSFGEFLHWWAMSGYTYQGCIDCLISYKFKDGQSAFARRFWEEAAGTGRLGYVFGCPVRSVVNERDAVRVTARDGREFAAKRLVCTIPLNVLSSVHFSPPLSPQRMAAANIGHVNQCVKVHAEVSNKDMRSWSGISYPFNKLAYAIGDGTTPAGNTHIVCLGGAHNHIQPEEDVEATKMAVENMSPGNMDIKRLVFHNWCKDEFAKGAWFFAPPQLLSKSLDELRARHGNVLFANSDWALGWRGFIDGAIEEGTRAAVTVIEELRPAPAVRSHL

SEQ ID NO: 819 - DNA, 1485 bp, synthetic construct
  misc_feature 1..1485: note = Variant of monoamine oxidase
  source 1..1485: mol_type = other DNA
atgaccagccgcgacggctatcagtggaccccggaaacgggtctgacccagggcgtaccgtccctgggtgtcatttcgccgccgactaacatcgaagataccgataaggacgggccttgggatgtcattgtcattgggggcgggtattgtgggctgaccgcaacccgtgatttaaccgtcgcagggttcaagacgctgctgctggaggcccgtgatcgtattggtggccgctcctggagcagtaatattgacggttacccgtatgagatgggtggcacttgggttcattggcatcaaccgcacgtgtggcgtgaaatcacgcgttataaaatgcacaacgcgctgtctccatcatttaacttttcacgtggcgtgaatcacttccaactgcgtaccaatccgaccaccagtacgtacatgacgcacgaagcggaggatgaactgctgcgtagcgcattgcataaattcaccaatgtcgacggcactaatggccgtacagtgttgccgttcccacatgatatgttttatgtgccggaatttcgcaagtatgacgaaatgtcatattccgaacgcattgaccagatccgcgacgaactgtctttgaacgaacgctctagtttagaggctttcattttattatgtagcggtggcaccctggaaaactccagctttggtgaatttctgcattggtgggcaatgtcgggttacacgtatcagggctgtatggattgtttaatctcctataaatttaaggatggccagagtgcgttcgcgcgtcgcttctgggaagaagccgctggcactggccgtctgggctatgtctttggttgtccggtgcgttctgtggtgaacgaacgcgacgcagtacgtgttaccgcacgtgacggtcgcgaattcgcagcgaaacgtttggtttgcacgattccgctgaacgtattgagttctgttcattttagcccaccactgtccccgcaacgcatggccgctgcgaacattggccatgttaaccagtgcgtcaaagtgcatgcggaagtcagtaacccagatatgcgttcatggtcgggtatctcctatccgttcaacaaattagcctacgctatcggcgatggcacgaccccagcgggtaatacgcatattgtgtgccttgggggggcccataatcatatccagccggaagaggacgtggaagcaacgaagatggccgttgaaaacatgtcgcctgggaatatggatatcaaacgtctggtcttccacaactggtgcaaggatgaatttgccaaaggcgcgtggttcttcgcccctccacagctgctgtcaaagagcctggatgaactgcgcgcacgtcacggtaatgtcctgtttgcaaactccgattgggccttaggttggcgtggttttatcgatggtgctatcgaggagggcacccgcgcagcggttactgtaattgaggaactgcgtcctgcgcctgcggtgcgttcccacctg

SEQ ID NO: 820 - protein, 495 aa, synthetic construct
  REGION 1..495: note = Variant of monoamine oxidase
MTSRDGYQWTPETGLTQGVPSLGVISPPTNIEDTDKDGPWDVIVIGGGYCGLTATRDLTVAGFKTLLLEARDRIGGRSWSSNIDGYPYEMGGTWVHWHQPHVWREITRYKMHNALSPSFNFSRGVNHFQLRTNPTTSTYMTHEAEDELLRSALHKFTNVDGTNGRTVLPFPHDMFYVPEFRKYDEMSYSERIDQIRDELSLNERSSLEAFILLCSGGTLENSSFGEFLHWWAMSGYTYQGCMDCLISYKFKDGQSAFARRFWEEAAGTGRLGYVFGCPVRSVVNERDAVRVTARDGREFAAKRLVCTIPLNVLSSVHFSPPLSPQRMAAANIGHVNQCVKVHAEVSNPDMRSWSGISYPFNKLAYAIGDGTTPAGNTHIVCLGGAHNHIQPEEDVEATKMAVENMSPGNMDIKRLVFHNWCKDEFAKGAWFFAPPQLLSKSLDELRARHGNVLFANSDWALGWRGFIDGAIEEGTRAAVTVIEELRPAPAVRSHL

SEQ ID NO: 821 - DNA, 1485 bp, synthetic construct
  misc_feature 1..1485: note = Variant of monoamine oxidase
  source 1..1485: mol_type = other DNA
atgaccagccgcgacggctatcagtggaccccggaaacgggtctgacccagggcgtaccgtccctgggtgtcatttcgccgccgactaacatcgaagataccgataaggacgggccttgggatgtcattgtcattgggggcgggtattgtgggctgaccgcaacccgtgatttaaccgtcgcagggttcaagacgctgctgctggaggcccgtgatcgtattggtggccgctcctggagcagttttattgacggttacggttatgagatgggtggcacttgggttcattggcatcaatctcacgtgtggcgtgaaatcacgcgttataaaatgcacaacgcgctgtctccgtcatttaacttttcacgtggcgtgaatcacttccaactgcgtaccaatccgaccaccagtacgtacatgacgcacgaagcggaggatgaactgctgcgtagcgcattgcataaattcaccaatgtcgacggcactaatggccgtacagtgttgccgttcccacatgatatgttttatgtgccggaatttcgcaagtatgacgaaatgtcatattccgaacgcattgaccagatccgcgacgaactgtctttgaacgaacgctctagtttagaggctttcattttattatgtagcggtggcggctcggaaaactccagctttggtgaatttctgcattggtgggcaatgtcgggttacacgtatcagggctgtatggattgtttaatctcctataaatttaaggatggccagagtgcgttcgcgcgtcgcttctgggaagaagccgctggcactggccgtctgggctatgtctttggttgtccggtgcgttctgtggtgaacgaacgcgacgcagtacgtgttaccgcacgtgacggtcgcgaattcgcagcgaaacgtttggtttgcacgattccgctgaacgtattgagttctgttcattttagcccaccactgtccccgcaacgcatggccgctgcgaacattggccatgttaaccagtgcgtcaaagtgcatgcggaagtcagttgtccggatatgcgttcatggtcgggtatctcctatccgttcaacaaattagcctacgctatcggcgatggcacgaccccagcgggtaatacgcatattgtgtgccttgggggggcccataatcatatccagccggaagaggacgtggaagcaacgaagatggccgttgaaaacatgtcgcctgggaatatggatatcaaacgtctggtcttccataactggagcaaggatgaatttgccaaaggcgcgtggttcttcgcccctccacagctgctgtcaaagagcctggatgaactgcgctgccgtcacggtaatgtcctgtttgcaaactccgattgggccttaggttggcgtggttttatcgatggtgctatcgaggagggcacccgcgcagcggttactgtaattgaggaactgcgtcctgcgcctgcggtgcgttcccacctg

SEQ ID NO: 822 - protein, 495 aa, synthetic construct
  REGION 1..495: note = Variant of monoamine oxidase
MTSRDGYQWTPETGLTQGVPSLGVISPPTNIEDTDKDGPWDVIVIGGGYCGLTATRDLTVAGFKTLLLEARDRIGGRSWSSFIDGYGYEMGGTWVHWHQSHVWREITRYKMHNALSPSFNFSRGVNHFQLRTNPTTSTYMTHEAEDELLRSALHKFTNVDGTNGRTVLPFPHDMFYVPEFRKYDEMSYSERIDQIRDELSLNERSSLEAFILLCSGGGSENSSFGEFLHWWAMSGYTYQGCMDCLISYKFKDGQSAFARRFWEEAAGTGRLGYVFGCPVRSVVNERDAVRVTARDGREFAAKRLVCTIPLNVLSSVHFSPPLSPQRMAAANIGHVNQCVKVHAEVSCPDMRSWSGISYPFNKLAYAIGDGTTPAGNTHIVCLGGAHNHIQPEEDVEATKMAVENMSPGNMDIKRLVFHNWSKDEFAKGAWFFAPPQLLSKSLDELRCRHGNVLFANSDWALGWRGFIDGAIEEGTRAAVTVIEELRPAPAVRSHL

SEQ ID NO: 823 - DNA, 1485 bp, synthetic construct
  misc_feature 1..1485: note = Variant of monoamine oxidase
  source 1..1485: mol_type = other DNA
atgaccagccgcgacggctatcagtggaccccggaaacgggtctgacccagggcgtaccgtccctgggtgtcatttcgccgccgactaacatcgaagataccgataaggacgggccttgggatgtcattgtcattgggggcgggtattgtgggctgaccgcaacccgtgatttaaccgtcgcagggttcaagacgctgctgctggaggcccgtgatcgtattggtggccgctcctggagcagtcgcattgacggttacctgtatgagatgggtggcacttgggttcattggcatcaatctcacgtgtggcgtgaaatcacgcgttataaaatgcacaacgcgctgtctccatcatttaacttttcacgtggcgtgaatcacttccaactgcgtaccaatccgaccaccagtacgtacatgacgcacgaagcggaggatgaactgctgcgtagcgcattgcataaattcaccaatgtcgacggcactaatggccgtacagtgttgccgttcccacatgatatgttttatgtgccggaatttcgcaagtatgacgaaatgtcatattccgaacgcattgaccagatccgcgacgaactgtctttgaacgaacgctctagtttagaggctttcattttattatgtagcggtggcacctcggaaaactccagctttggtgaatttctgcattggtgggcaatgtcgggttacacgtatcagggctgtatggattgtttaatctcctataaatttaaggatggccagagtgcgttcgcgcgtcgcttctgggaagaagccgctggcactggccgtctgggctatgtctttggttgtccggtgcgttctgtggtgaacgaacgcgacgcagtacgtgttaccgcacgtgacggtcgcgaattcgcagcgaaacgtttggtttgcacgattccgctgaacgtattgagttctgttcattttagcccaccactgtccccgcaacgcatggccgctgcgaacattggccatgttaaccagtgcgtcaaagtgcatgcggaagtcagttgtccggatatgcgttcatggtcgggtatctcctatccgttcaacaaattagcctacgctatcggcgatggcacgaccccagcgggtaatacgcatattgtgtgccttgggggggcccataatcatatccagccggaagaggacgtggaagcaacgaagatggccgttgaaaacatgtcgcctgggaatatggatatcaaacgtctggtcttccacaactggtgcaaggatgaatttgccaaaggcgcgtggttcttcgcccctccacagctgctgtcaaagagcctggatgaactgcgctgccgtcacggtaatgtcctgtttgcaaactccgattgggccttaggttggcgtggttttatcgatggtgctatcgaggagggcacccgcgcagcggttactgtaattgaggaactgcgtcctgcgcctgcggtgcgttcccacctg

SEQ ID NO: 824 - protein, 495 aa, synthetic construct
  REGION 1..495: note = Variant of monoamine oxidase
MTSRDGYQWTPETGLTQGVPSLGVISPPTNIEDTDKDGPWDVIVIGGGYCGLTATRDLTVAGFKTLLLEARDRIGGRSWSSRIDGYLYEMGGTWVHWHQSHVWREITRYKMHNALSPSFNFSRGVNHFQLRTNPTTSTYMTHEAEDELLRSALHKFTNVDGTNGRTVLPFPHDMFYVPEFRKYDEMSYSERIDQIRDELSLNERSSLEAFILLCSGGTSENSSFGEFLHWWAMSGYTYQGCMDCLISYKFKDGQSAFARRFWEEAAGTGRLGYVFGCPVRSVVNERDAVRVTARDGREFAAKRLVCTIPLNVLSSVHFSPPLSPQRMAAANIGHVNQCVKVHAEVSCPDMRSWSGISYPFNKLAYAIGDGTTPAGNTHIVCLGGAHNHIQPEEDVEATKMAVENMSPGNMDIKRLVFHNWCKDEFAKGAWFFAPPQLLSKSLDELRCRHGNVLFANSDWALGWRGFIDGAIEEGTRAAVTVIEELRPAPAVRSHL

SEQ ID NO: 825 - DNA, 1485 bp, synthetic construct
  misc_feature 1..1485: note = Variant of monoamine oxidase
  source 1..1485: mol_type = other DNA
atgaccagccgcgacggctatcagtggaccccggaaacgggtctgacccagggcgtaccgtccctgggtgtcatttcgccgccgactaacatcgaagataccgataaggacgggccttgggatgtcattgtcattgggggcgggtattgtgggctgaccgcaacccgtgatttaaccgtcgcagggttcaagacgctgctgctggaggcccgtgatcgtattggtggccgctcctggagcagtaatattgacggttacccgtatgagatgggtggcacttgggttcattggcatcaatcgcacgtgtggcgtgaaatcacgcgttataaaatgcacaacgcgctgtctccatcatttaacttttcacgtggcgtgaatcacttccaactgcgtaccaatccgaccaccagtacgtacatgacgcacgaagcgggggatgaactgctgcgtagcgcattgcataaattcaccaatgtcgacggcactaatggccgtacagtgttgccgttcccacatgatatgttttatgtgccggaatttcgcaagtatgacgaaatgtcatattccgaacgcattgaccagatccgcgacgatctgtctttgaacgaacgcactagtttagaggctttcattttattatgtagcggtggcaccctggaaaactccagctttggtgaatttctgcattggtgggcaatgtcgggttacacgtatcagggctgtatggattgtttaatctcctataaatttaaggatggccagagtgcgttcgcgcgtcgcttctgggaagaagccgctggcactggccgtctgggctatgtctttggttgcccggtgcgttctgtggtgaacgaacgcgacgcagtacgtgttaccgcacgtgacggtcgcgaattcgcagcgaaacgtttggtttgcacgattccgctgaacgtattgagttctgttcattttagcccaccactgtccccgcaacgcatggccgctgcgaacattggccatgttaaccagtgcgtcaaagtgcatgcggaagtcagttgcaaggatatgcgttcatggtcgggtatctcctatccgttcaacaaattagcctacgctatcggcgatggcacgaccccagcgggtaatacgcatattgtgtgccttgggggggcccataatcatatccagccggaagaggacgtggaagcaacgaagatggccgttgaaaacatgtcgcctgggaatatggatatcaaacgtctggtcttccacaactggtgcaaggatgaatttgccaaaggcgcgtggttcttcgcccctccacagctgctgtcaaagagcctggatgaactgcgctgtcgtcacggtaatgtcctgtttgcaaactccgattgggccttaggttggcgtggttttatcgatggtgctatcgaggagggcacccgcgcagcggttactgtaattgaggaactgcgtcctgcgcctgcggtgcgttcccacctg

SEQ ID NO: 826 - protein, 495 aa, synthetic construct
  REGION 1..495: note = Variant of monoamine oxidase
MTSRDGYQWTPETGLTQGVPSLGVISPPTNIEDTDKDGPWDVIVIGGGYCGLTATRDLTVAGFKTLLLEARDRIGGRSWSSNIDGYPYEMGGTWVHWHQSHVWREITRYKMHNALSPSFNFSRGVNHFQLRTNPTTSTYMTHEAGDELLRSALHKFTNVDGTNGRTVLPFPHDMFYVPEFRKYDEMSYSERIDQIRDDLSLNERTSLEAFILLCSGGTLENSSFGEFLHWWAMSGYTYQGCMDCLISYKFKDGQSAFARRFWEEAAGTGRLGYVFGCPVRSVVNERDAVRVTARDGREFAAKRLVCTIPLNVLSSVHFSPPLSPQRMAAANIGHVNQCVKVHAEVSCKDMRSWSGISYPFNKLAYAIGDGTTPAGNTHIVCLGGAHNHIQPEEDVEATKMAVENMSPGNMDIKRLVFHNWCKDEFAKGAWFFAPPQLLSKSLDELRCRHGNVLFANSDWALGWRGFIDGAIEEGTRAAVTVIEELRPAPAVRSHL

SEQ ID NO: 827 - DNA, 1485 bp, synthetic construct
  misc_feature 1..1485: note = Variant of monoamine oxidase
  source 1..1485: mol_type = other DNA
atgaccagccgcgacggctatcagtggaccccggaaacgggtctgacccagggcgtaccgtccctgggtgtcatttcgccgccgactaacatcgaagataccgataaggacgggccttgggatgtcattgtcattgggggcgggtattgtgggctgaccgcaacccgtgatttaaccgtcgcagggttcaagacgctgctgctggaggcccgtgatcgtattggtggccgctcctggcacagtaatattgacggttacccgtatgagatgggtggcacttgggttcattggcatcaatctcacgtgtggcgtgaaatcacgcgttataaaatgcacaacgcgctgtctccatcatttaacttttcacgtggcgtgaatcacttccaactgcgtaccaatccgaccaccagtacgtacatgacgcacgaagcggaggatgaactgctgcgtagcgcattgcataaattcaccaatgtcgacggcactaatggccgtacagtgttgccgttcccacatgatatgttttatgtgccggaatttcgcaagtatgacgaaatgtcatattccgaacgcattgaccagatccgcgacgaactgtctttgaacgaacgctctagtttagaggctttcattttattatgtagcggtggcaccctggaaaactccagctttggtgaatttctgcattggtgggcaatgtcgggttacacgtatcagggctgtatggattgtttaatctcctataaatttaaggatggccagagtgcgttcgcgcgtcgcttctgggaagaagccgctggcactggccgtctgggctatgtctttggttgtccggtgcgttctgtggtgaacgaacgcgacgcagtacgtgttaccgcacgtgacggtcgcgaattcgcagcgaaacgtttggtttgcacgattccgctgaacgtattgagttctgttcattttagcccaccactgtccccgcaacgcatggccgctgcgaacatcggccatgttaaccagtgcgtcaaagtgcatgcggaagtcagttgtccggatatgcgttcatggtcgggtatctcctatccgttcaacaaattagcctacgctatcggcgatggcacgaccccagcgggtaatacgcatattgtgtgccttgggggggcccataatcatatccagccggaagaggacgtggaagcaacgaagatggccgttgaaaacatgtcgcctgggaatatggatatcaaacgtctggtcttccacaactggtgcaaggatgaatttgccaaaggcgcgtggttcttcgcccctccacagctgctgtcaaagagcctggatgaactgcgctgccgtcacggtaatgtcctgtttgcaaactccgattgggccttaggttggcgtggttttatcgatggtgctatcgaggagggcacccgcgcagcggttactgtaattgaggaactgcgtcctgcgcctgcggtgcgttcccacctg

SEQ ID NO: 828 - protein, 495 aa, synthetic construct; identical to SEQ ID NO: 38
  REGION 1..495: note = Variant of monoamine oxidase

SEQ ID NO: 829 - DNA, 1485 bp, synthetic construct
  misc_feature 1..1485: note = Variant of monoamine oxidase
  source 1..1485: mol_type = other DNA
atgaccagccgcgacggctatcagtggaccccggaaacgggtctgacccagggcgtaccgtccctgggtgtcatttcgccgccgactaacatcgaagataccgataaggacgggccttgggatgtcattgtcattgggggcgggtattgtgggctgaccgcaacccgtgatttaaccgtcgcagggttcaagacgctgctgctggaggcccgtgatcgtattggtggccgctcctggagcagtaatattgacggttacccgtatgagatgggtggcacttgggttcattggcatcaaccgcacgtgtggcgtgaaatcacgcgttataaaatgcacaacgcgctgtctccatcatttaacttttcacgtggcgtgaatcacttccaactgcgtaccaatccgaccaccagtacgtacatgacgcacgaagcggaggatgaactgatgcgtagcgcattgcataaattcaccaatgtcgacggcactaatggccgtacagtgttgccgttcccacatgatatgttttatgtgccggaatttcgcaagtatgacgaaatgtcatattccgaacgcattgaccagatccgcgacgaactgtctttgaacgaacgctctagtttagaggctttcattttattatgtagcggtggcaccctggaaaactccagctttggtgaatttctgcattggtgggcaatgtcgggttacacgtatcagggctgtattgattgtttaatgtcctataaatttaaggatggccagagtgcgttcgcgcgtcgcttctgggaagaagccgctggcactggccgtctgggctatgtctttggtactccggtgcgttctgtggtgaacgaacgcgacgcagtacgtgttaccgcacgtgacggtcgcgaattcgcagcgaaacgtttggtttgcacgattccgctgaacgtattgagttctgttcattttagcccaccactgtccccgcaacgcatggccgctgcgaacattggccatgttaaccagtgcgtcaaagtgcatgcggaagtcagtaacaaggatatgcgttcatggtcgggtatctcctatccgttcaacaaattagcctacgctatcggcgatggcacgaccccagcgggtaatacgcatattgtgtgccttgggggggcccataatcatatccagccggaagaggacgtggaagcaacgaagatggccgttgaaaacatgtcgcctgggaatatggatatcaaacgtctggtcttccacaactggtgcaaggatgaatttgccaaaggcgcgtggttcttcgcccctccacagctgctgtcaaagagcctggatgaacgtcgctgtcgtcacggtaatgtcctgtttgcaaactccgattgggccttaggttggcgtggttttatcgatggtgctatcgaggagggcacccgcgcagcggttactgtaattgaggaactgcgtcctgcgcctgcggtgcgttcccacctg

SEQ ID NO: 830 - protein, 495 aa, synthetic construct
  REGION 1..495: note = Variant of monoamine oxidase
MTSRDGYQWTPETGLTQGVPSLGVISPPTNIEDTDKDGPWDVIVIGGGYCGLTATRDLTVAGFKTLLLEARDRIGGRSWSSNIDGYPYEMGGTWVHWHQPHVWREITRYKMHNALSPSFNFSRGVNHFQLRTNPTTSTYMTHEAEDELMRSALHKFTNVDGTNGRTVLPFPHDMFYVPEFRKYDEMSYSERIDQIRDELSLNERSSLEAFILLCSGGTLENSSFGEFLHWWAMSGYTYQGCIDCLMSYKFKDGQSAFARRFWEEAAGTGRLGYVFGTPVRSVVNERDAVRVTARDGREFAAKRLVCTIPLNVLSSVHFSPPLSPQRMAAANIGHVNQCVKVHAEVSNKDMRSWSGISYPFNKLAYAIGDGTTPAGNTHIVCLGGAHNHIQPEEDVEATKMAVENMSPGNMDIKRLVFHNWCKDEFAKGAWFFAPPQLLSKSLDERRCRHGNVLFANSDWALGWRGFIDGAIEEGTRAAVTVIEELRPAPAVRSHL

SEQ ID NO: 831 - DNA, 1485 bp, synthetic construct
  misc_feature 1..1485: note = Variant of monoamine oxidase
  source 1..1485: mol_type = other DNA
atgaccagccgcgacggctatcagtggaccccggaaacgggtctgacccagggcgtaccgtccctgggtgtcatttcgccgccgactaacatcgaagataccgataaggacgggccttgggatgtcattgtcattgggggcgggtattgtgggctgaccgcaacccgtgatttaaccgtcgcagggttcaagacgctgctgctggaggcccgtgatcgtattggtggccgctcctggcacagtaatattgacggttacccgtatgagatgggtggcacttgggttcattggcatcaatctcacgtgtggcgtgaaatcacgcgttataaaatgcacaacgcgctgtctccatcatttaacttttcacgtggcgtgaatcacttccaactgcgtaccaatccgaccaccagtacgtacatgacgcacgaagcggaggatgaactgctgcgtagcgcattgcataaattcaccaatgtcgacggcactaatggccgtacagtgttgccgttcccacatgatatgttttatgtgccggaatttcgcaagtatgatgaaatgtcattttccgatcgcattgaccagatccgcgacgaactgtctttgaacgaacgctctagtttagaggctttcattttattatgtagcggtggcaccctggaaaactccagctttggtgaatttctgcattggtgggcaatgtcgggttacacgtatcagggctgtatggattgtttaatctcctataaatttaaggatggccagagtgcgttcgcgcgtcgcttctgggaagaagccgctggcactggccgtctgggctatgtctttggttgtccggtgcgttctgtggtgaacgaacgcgacgcagtacgtgttaccgcacgtgacggtcgcgaattcgcagcgaaacgtttggtttgcacgattccgctgaacgtattgagttctgttcattttagcccaccactgtccccgcaacgcatggccgctgcgaacggcggccatgttaaccagtgcgtcaaagtgcatgcggaagtcagttgtccggatatgcgttcatggtcgggtatctcctatccgttcaacaaattagcctacgctatcggcgatggcacgaccccagcgggtaatacgcatattgtgtgccttgggggggccgagaatcatatccagccggaagaggacgtggaagcaacgaagatggccgttgaaaacatgtcgcctgggaatatggatatcaaacgtctggtcttccacaactggtgcaaggatgaatttgccaaaggcgcgtggttcttcgcccctccacagctgctgtcaaagagcctggatgaactgcgctgccgtcacggtaatgtcctgtttgcaaactccgattgggccttaggttggcgtggttttatcgatggtgctatcgaggagggcacccgcgcagcggttactgtaattgaggaactgcgtcctgcgcctgcggtgcgttcccacctg

SEQ ID NO: 832 - protein, 495 aa, synthetic construct
  REGION 1..495: note = Variant of monoamine oxidase
MTSRDGYQWTPETGLTQGVPSLGVISPPTNIEDTDKDGPWDVIVIGGGYCGLTATRDLTVAGFKTLLLEARDRIGGRSWHSNIDGYPYEMGGTWVHWHQSHVWREITRYKMHNALSPSFNFSRGVNHFQLRTNPTTSTYMTHEAEDELLRSALHKFTNVDGTNGRTVLPFPHDMFYVPEFRKYDEMSFSDRIDQIRDELSLNERSSLEAFILLCSGGTLENSSFGEFLHWWAMSGYTYQGCMDCLISYKFKDGQSAFARRFWEEAAGTGRLGYVFGCPVRSVVNERDAVRVTARDGREFAAKRLVCTIPLNVLSSVHFSPPLSPQRMAAANGGHVNQCVKVHAEVSCPDMRSWSGISYPFNKLAYAIGDGTTPAGNTHIVCLGGAENHIQPEEDVEATKMAVENMSPGNMDIKRLVFHNWCKDEFAKGAWFFAPPQLLSKSLDELRCRHGNVLFANSDWALGWRGFIDGAIEEGTRAAVTVIEELRPAPAVRSHL

SEQ ID NO: 833 - DNA, 1485 bp, synthetic construct
  misc_feature 1..1485: note = Variant of monoamine oxidase
  source 1..1485: mol_type = other DNA
atgaccagccgcgacggctatcagtggaccccggaaacgggtctgacccagggcgtaccgtccctgggtgtcatttcgccgccgactaacatcgaagataccgataaggacgggccttgggatgtcattgtcattgggggcgggtattgtgggctgaccgcaacccgtgatttaaccgtcgcagggttcaagacgctgctgctggaggcccgtgatcgtattggtggccgctcctggagcagtaacattgacggttacctgtatgagatgggtggcacttgggttcattggcatcaatctcacgtgtggcgtgaaatcacgcgttataaaatgcacaacgcgctgtctccgtcatttaacttttcacgtggcgtgaatcacttccaactgcgtaccaatccgaccaccagtacgtacatgacgcacgaagcggaggatgaactgctgcgtagcgcattgcataaattcaccaatgtcgacggcactaatggccgtacagtgttgccgttcccacatgatatgttttatgtgccggaatttcgcaagtatgacgaaatgtcatattccgaacgcattgaccagatccgcgacgaactgtctttgaacgaacgctctagtttagaggctttcattttattatgtagcggtggcggctcggaaaactccagctttggtgaatttctgcattggtgggcaatgtcgggttacacgtatcagggctgtatggattgtttaatctcctataaatttaaggatggccagagtgcgttcgcgcgtcgcttctgggaagaagccgctggcactggccgtctgggctatgtctttggttgtccggtgcgttctgtggtgaacgaacgcgacgcagtacgtgttaccgcacgtgacggtcgcgaattcgcagcgaaacgtttggtttgcacgattccgctgaacgtattgagttctgttcattttagcccaccactgtccccgcaacgcatggccgctgcgaacattggccatgttaaccagtgcgtcaaagtgcatgcggaagtcagttgtccggatatgcgttcatggtcgggtatctcctatccgttcaacaaattagcctacgctatcggcgatggcacgaccccagcgggtaatacgcatattgtgtgccttgggggggcccataatcatatccagccggaagaggacgtggaagcaacgaagatggccgttgaaaacatgtcgcctgggaatatggatatcaaacgtctggtcttccacaactggtgcaaggatgaatttgccaaaggcgcgtggttcttcgcccctccacagctgctgtcaaagagcctggatgaactgcgctgccgtcacggtaatgtcctgtttgcaaactccgattgggccttaggttggcgtggttttatcgatggtgctatcgaggagggcacccgcgcagcggttactgtaattgaggaactgcgtcctgcgcctgcggtgcgttcccacctg

SEQ ID NO: 834 - protein, 495 aa, synthetic construct
  REGION 1..495: note = Variant of monoamine oxidase
MTSRDGYQWTPETGLTQGVPSLGVISPPTNIEDTDKDGPWDVIVIGGGYCGLTATRDLTVAGFKTLLLEARDRIGGRSWSSNIDGYLYEMGGTWVHWHQSHVWREITRYKMHNALSPSFNFSRGVNHFQLRTNPTTSTYMTHEAEDELLRSALHKFTNVDGTNGRTVLPFPHDMFYVPEFRKYDEMSYSERIDQIRDELSLNERSSLEAFILLCSGGGSENSSFGEFLHWWAMSGYTYQGCMDCLISYKFKDGQSAFARRFWEEAAGTGRLGYVFGCPVRSVVNERDAVRVTARDGREFAAKRLVCTIPLNVLSSVHFSPPLSPQRMAAANIGHVNQCVKVHAEVSCPDMRSWSGISYPFNKLAYAIGDGTTPAGNTHIVCLGGAHNHIQPEEDVEATKMAVENMSPGNMDIKRLVFHNWCKDEFAKGAWFFAPPQLLSKSLDELRCRHGNVLFANSDWALGWRGFIDGAIEEGTRAAVTVIEELRPAPAVRSHL

SEQ ID NO: 835 - DNA, 1485 bp, synthetic construct
  misc_feature 1..1485: note = Variant of monoamine oxidase
  source 1..1485: mol_type = other DNA
atgaccagccgcgacggctatcagtggaccccggaaacgggtctgacccagggcgtaccgtccctgggtgtcatttcgccgccgactaacatcgaagataccgataaggacgggccttgggatgtcattgtcattgggggcgggtattgtgggctgaccgcaacccgtgatttaaccgtcgcagggttcaagacgctgctgctggaggcccgtgatcgtattggtggccgctcctggagcagtaatattgacggttacccgtatgagatgggtggcacttgggttcattggcatcaatctcacgtgtggcgtgaaatcacgcgttataaaatgcacaacgcgctgtctccatcatttaacttttcacgtggcgtgaatcacttccaactgcgtaccaatccgaccaccagtacgtacatgacgcacgaagcggaggatgaactgctgcgtagcgcattgcataaattcaccaatgtcgacggcactaatggccgtacagtgttgccgttcccacatgatatgttttatgtgccggaatttcgcaagtatgacgaaatgtcatattccgaacgcattgaccagatccgcgacgaactgtctttgaacgaacgctctagtttagaggctttcattttattatgtagcggtggcacctcggaaaactccagctttggtgaatttctgcattggtgggcaatgtcgggttacacgtatcagggctgtatggattgtttaatctcctataaatttaaggatggccagagtgcgttcgcgcgtcgcttctgggaagaagccgctggcactggccgtctgggctatgtctttggttgtccggtgcgttctgtggtgaacgaacgcgacgcagtacgtgttaccgcacgtgacggtcgcgaattcgcagcgaaacgtttggtttgcacgattccgctgaacgtattgagttctgttcattttagcccaccactgtccccgcaacgcatggccgctgcgaacattggccatgttaaccagtgcgtcaaagtgcatgcggaagtcagttgtccggatatgcgttcatggtcgggtatctcctatccgttcaacaaattagcctacgctatcggcgatggcacgaccccagcgggtaatacgcatattgtgtgccttgggggggcccataatcatatccagccggaagaggacgtggaagcaacgaagatggccgttgaaaacatgtcgcctgggaatatggatatcaaacgtctggtcttccacaactggtgcaaggatgaatttgccaaaggcgcgtggttcttcgcccctccacagctgctgtcaaagagcctggatgaactgcgctgccgtcacggtaatgtcctgtttgcaaactccgattgggccttaggttggcgtggttttatcgatggtgctatcgaggagggcacccgcgcagcggttactgtaattgaggaactgcgtcctgcgcctgcggtgcgttcccacctg

SEQ ID NO: 836 - protein, 495 aa, synthetic construct; identical to SEQ ID NO: 98
  REGION 1..495: note = Variant of monoamine oxidase

SEQ ID NO: 837 - DNA, 1485 bp, synthetic construct
  misc_feature 1..1485: note = Variant of monoamine oxidase
  source 1..1485: mol_type = other DNA
atgaccagccgcgacggctatcagtggaccccggaaacgggtctgacccagggcgtaccgtccctgggtgtcatttcgccgccgactaacatcgaagataccgataaggacgggccttgggatgtcattgtcattgggggcgggtattgtgggctgaccgcaacccgtgatttaaccgtcgcagggttcaagacgctgctgctggaggcccgtgatcgtattggtggccgctcctggagcagtaatattgacggttacccgtatgagatgggtggcacttgggttcattggcatcaatcgcacgtgtggcgtgaaatcacgcgttataaaatgcacaacgcgctgtctccatcatttaacttttcacgtggcgtgaatcacttccaactgcgtaccaatccgaccaccagtacgtacatgacgcacgaagcgggggctgaactgctgcgtagcgcattgcataaattcaccaatgtcgacggcactaatggccgtacagtgttgccgttcccacatgatatgttttatgtgccggaatttcgcaagtatgacgaaatgtcatattccgaacgcattgaccagatccgcgacgaactgtctttgaacgaacgctctagtttagaggctttcattttattatgtagcggtggcaccctggaaaactccagctttggtgaatttctgcattggtgggcaatgtcgggttacacgtatcagggctgtatggattgtttaatttcctataaatttaaggatggccagagtgcgttcgcgcgtcgcttctgggaagaagccgctggcactggccgtctgggctatgtctttggtactccggtgcgttctgtggtgaacgaacgcgacgcagtacgtgttaccgcacgtgacggtcgcgaattcgcagcgaaacgtttggtttgcacgattccgctgaacgtattgagttctgttcattttagcccaccactgtccccgcaacgcatggccgctgcgaacattggccatgttaaccagtgcgtcaaagtgcatgcggaagtcagtaacccagatatgcgttcatggtcgggtatctcctatccgttcaacaaattagcctacgctatcggcgatggcacgaccccagcgggtaatacgcatattgtgtgccttgggggggcccataatcatatccagccggaagaggacgtggaagcaacgaagatggccgttgaaaacatgtcgcctgggaatatggatatcaaacgtctggtcttccacaactggtgcaaggatgaatttgccaaaggcgcgtggttcttcgcccctccacagctgctgtcaaagagcctggatgaactgcgctgtcgtcacggtaatgtcctgtttgcaaactccgattgggccttaggttggcgtggttttatcgatggtgctatcgaggagggcacccgcgcagcggttactgtaattgaggaactgcgtcctgcgcctgcggtgcgttcccacctg

SEQ ID NO: 838 - protein, 495 aa, synthetic construct
  REGION 1..495: note = Variant of monoamine oxidase
MTSRDGYQWTPETGLTQGVPSLGVISPPTNIEDTDKDGPWDVIVIGGGYCGLTATRDLTVAGFKTLLLEARDRIGGRSWSSNIDGYPYEMGGTWVHWHQSHVWREITRYKMHNALSPSFNFSRGVNHFQLRTNPTTSTYMTHEAGAELLRSALHKFTNVDGTNGRTVLPFPHDMFYVPEFRKYDEMSYSERIDQIRDELSLNERSSLEAFILLCSGGTLENSSFGEFLHWWAMSGYTYQGCMDCLISYKFKDGQSAFARRFWEEAAGTGRLGYVFGTPVRSVVNERDAVRVTARDGREFAAKRLVCTIPLNVLSSVHFSPPLSPQRMAAANIGHVNQCVKVHAEVSNPDMRSWSGISYPFNKLAYAIGDGTTPAGNTHIVCLGGAHNHIQPEEDVEATKMAVENMSPGNMDIKRLVFHNWCKDEFAKGAWFFAPPQLLSKSLDELRCRHGNVLFANSDWALGWRGFIDGAIEEGTRAAVTVIEELRPAPAVRSHL

SEQ ID NO: 839 - DNA, 1485 bp, synthetic construct
  misc_feature 1..1485: note = Variant of monoamine oxidase
  source 1..1485: mol_type = other DNA
atgaccagccgcgacggctatcagtggaccccggaaacgggtctgacccagggcgtaccgtccctgggtgtcatttcgccgccgactaacatcgaagataccgataaggacgggccttgggatgtcattgtcattgggggcgggtattgtgggctgaccgcaacccgtgatttaaccgtcgcagggttcaagacgctgctgctggaggcccgtgatcgtattggtggccgctcctggagcagtaatattgacggttacccgtatgagatgggtggcacttgggttcattggcatcaaccgcacgtgtggcgtgaaatcacgcgttataaaatgcacaacgcgctgtctccatcatttaacttttcacgtggcgtgaatcacttccaactgcgtaccaatccgaccaccagtacgtacatgacgcacgaagcgtcggatgaactgatgcgtagcgcattgcataaattcaccaatgtcgacggcactaatggccgtacagtgttgccgttcccacatgatatgttttatgtgccggaatttcgcaagtatgacgaaatgtcatattccgaacgcattgaccagatccgcgacgaactgtctttgaacgaacgctctagtttagaggctttcattttattatgtagcggtggcaccctggaaaactccagctttggtgaatttctgcattggtgggcaatgtcgggttacacgtatcagggctgtatggattgtttaatctcctataaatttaaggatggccagagtgcgttcgcgcgtcgcttctgggaagaagccgctggcactggccgtctgggctatgtctttggtactccggtgcgttctgtggtgaacgaacgcgacgcagtacgtgttaccgcacgtgacggtcgcgaattcgcagcgaaacgtttggtttgcacgattccgctgaacgtattgagttctgttcattttagcccaccactgtccccgcaacgcatggccgctgcgaacattggccatgttaaccagtgcgtcaaagtgcatgcggaagtcagttgcaaggatatgcgttcatggtcgggtatctcctatccgttcaacaaattagcctacgctatcggcgatggcacgaccccagcgggtaatacgcatattgtgtgccttgggggggcccataatcatatccagccggaagaggacgtggaagcaacgaagatggccgttgaaaacatgtcgcctgggaatatggatatcaaacgtctggtcttccacaactggtgcaaggatgaatttgccaaaggcgcgtggttcttcgcccctccacagctgctgtcaaagagcctggatgaacgtcgctgtcgtcacggtaatgtcctgtttgcaaactccgattgggccttaggttggcgtggttttatcgatggtgctatcgaggagggcacccgcgcagcggttactgtaattgaggaactgcgtcctgcgcctgcggtgcgttcccacctg

SEQ ID NO: 840 - protein, 495 aa, synthetic construct
  REGION 1..495: note = Variant of monoamine oxidase
MTSRDGYQWTPETGLTQGVPSLGVISPPTNIEDTDKDGPWDVIVIGGGYCGLTATRDLTVAGFKTLLLEARDRIGGRSWSSNIDGYPYEMGGTWVHWHQPHVWREITRYKMHNALSPSFNFSRGVNHFQLRTNPTTSTYMTHEASDELMRSALHKFTNVDGTNGRTVLPFPHDMFYVPEFRKYDEMSYSERIDQIRDELSLNERSSLEAFILLCSGGTLENSSFGEFLHWWAMSGYTYQGCMDCLISYKFKDGQSAFARRFWEEAAGTGRLGYVFGTPVRSVVNERDAVRVTARDGREFAAKRLVCTIPLNVLSSVHFSPPLSPQRMAAANIGHVNQCVKVHAEVSCKDMRSWSGISYPFNKLAYAIGDGTTPAGNTHIVCLGGAHNHIQPEEDVEATKMAVENMSPGNMDIKRLVFHNWCKDEFAKGAWFFAPPQLLSKSLDERRCRHGNVLFANSDWALGWRGFIDGAIEEGTRAAVTVIEELRPAPAVRSHL

SEQ ID NO: 841 - DNA, 1485 bp, synthetic construct
  misc_feature 1..1485: note = Variant of monoamine oxidase
  source 1..1485: mol_type = other DNA
atgaccagccgcgacggctatcagtggaccccggaaacgggtctgacccagggcgtaccgtccctgggtgtcatttcgccgccgactaacatcgaagataccgataaggacgggccttgggatgtcattgtcattgggggcgggtattgtgggctgaccgcaacccgtgatttaaccgtcgcagggttcaagacgctgctgctggaggcccgtgatcgtattggtggccgctcctggagcagtaatattgacggttacccgtatgagatgggtggcacttgggttcattggcatcaatcgcacgtgtggcgtgaaatcacgcgttataaaatgcacaacgcgctgtctccatcatttaacttttcacgtggcgtgaatcacttccaactgcgtaccaatccgaccaccagtacgtacatgacgcacgaagcgtcggctgaactgatgcgtagcgcattgcataaattcaccaatgtcgacggcactaatggccgtacagtgttgccgttcccacatgatatgttttatgtgccggaatttcgcaagtatgacgaaatgtcatattccgaacgcattgaccagatccgcgacgatctgtctttgaacgaacgctctagtttagaggctttcattttattatgtagcggtggcaccctggaaaactccagctttggtgaatttctgcattggtgggcaatgtcgggttacacgtatcagggctgtatggattgtttaatctcctataaatttaaggatggccagagtgcgttcgcgcgtcgcttctgggaagaagccgctggcactggccgtctgggctatgtctttggtactccggtgcgttctgtggtgaacgaacgcgacgcagtacgtgttaccgcacgtgacggtcgcgaattcgcagcgaaacgtttggtttgcacgattccgctgaacgtattgagttctgttcattttagcccaccactgtccccgcaacgcatggccgctgcgaacattggccatgttaaccagtgcgtcaaagtgcatgcggaagtcagttgcccagatatgcgttcatggtcgggtatctcctatccgttcaacaaattagcctacgctatcggcgatggcacgaccccagcgggtaatacgcatattgtgtgccttgggggggcccataatcatatccagccggaagaggacgtggaagcaacgaagatggccgttgaaaacatgtcgcctgggaatatggatatcaaacgtctggtcttccacaactggtgcaaggatgaatttgccaaaggcgcgtggttcttcgcccctccacagctgctgtcaaagagcctggatgaacgtcgcgcacgtcacggtaatgtcctgtttgcaaactccgattgggccttaggttggcgtggttttatcgatggtgctatcgaggagggcacccgcgcagcggttactgtaattgaggaactgcgtcctgcgcctgcggtgcgttcccacctg

SEQ ID NO: 842 - protein, 495 aa, synthetic construct
  REGION 1..495: note = Variant of monoamine oxidase
MTSRDGYQWTPETGLTQGVPSLGVISPPTNIEDTDKDGPWDVIVIGGGYCGLTATRDLTVAGFKTLLLEARDRIGGRSWSSNIDGYPYEMGGTWVHWHQSHVWREITRYKMHNALSPSFNFSRGVNHFQLRTNPTTSTYMTHEASAELMRSALHKFTNVDGTNGRTVLPFPHDMFYVPEFRKYDEMSYSERIDQIRDDLSLNERSSLEAFILLCSGGTLENSSFGEFLHWWAMSGYTYQGCMDCLISYKFKDGQSAFARRFWEEAAGTGRLGYVFGTPVRSVVNERDAVRVTARDGREFAAKRLVCTIPLNVLSSVHFSPPLSPQRMAAANIGHVNQCVKVHAEVSCPDMRSWSGISYPFNKLAYAIGDGTTPAGNTHIVCLGGAHNHIQPEEDVEATKMAVENMSPGNMDIKRLVFHNWCKDEFAKGAWFFAPPQLLSKSLDERRARHGNVLFANSDWALGWRGFIDGAIEEGTRAAVTVIEELRPAPAVRSHL

SEQ ID NO: 843 - DNA, 1485 bp, synthetic construct
  misc_feature 1..1485: note = Variant of monoamine oxidase
  source 1..1485: mol_type = other DNA
atgaccagccgcgacggctatcagtggaccccggaaacgggtctgacccagggcgtaccgtccctgggtgtcatttcgccgccgactaacatcgaagataccgataaggacgggccttgggatgtcattgtcattgggggcgggtattgtgggctgaccgcaacccgtgatttaaccgtcgcagggttcaagacgctgctgctggaggcccgtgatcgtattggtggccgctcctggagcagtaatattgacggttacccgtatgagatgggtggcacttgggttcattggcatcaatcgcacgtgtggcgtgaaatcacgcgttataaaatgcacaacgcgctgtctccatcatttaacttttcacgtggcgtgaatcacttccaactgcgtaccaatccgaccaccagtacgtacatgacgcacgaagcgtcggctgaactgatgcgtagcgcattgcataaattcaccaatgtcgacggcactaatggccgtacagtgttgccgttcccacatgatatgttttatgtgccggaatttcgcaagtatgacgaaatgtcatattccgaacgcattgaccagatccgcgacgaactgtctttgaacgaacgctctagtttagaggctttcattttattatgtagcggtggcaccctggaaaactccagctttggtgaatttctgcattggtgggcaatgtcgggttacacgtatcagggctgtatggattgtttaatctcctataaagttaaggatggccagagtgcgttcgcgcgtcgcttctgggaagaagccgctggcactggccgtctgggctatgtctttggtactccggtgcgttctgtggtgaacgaacgcgacgcagtacgtgttaccgcacgtgacggtcgcgaattcgcagcgaaacgtttggtttgcacgattccgctgaacgtattgagttctgttcattttagcccaccactgtccccgcaacgcatggccgctgcgaacattggccatgttaaccagtgcgtcaaagtgcatgcggaagtcagtgacaaggatatgcgttcatggtcgggtatctcctatccgttcaacaaattagcctacgctatcggcgatggcacgaccccagcgggtaatacgcatattgtgtgccttgggggggcccataatcatatccagccggaagaggacgtggaagcaacgaagatggccgttgaaaacatgtcgcctgggaatatggatatcaaacgtctggtcttccacaactggtgcaaggatgaatttgccaaaggcgcgtggttcttcgcccctccacagctgctgtcaaagagcctggatgaactgcgcgcacgtcacggtaatgtcctgtttgcaaactccgattgggccttaggttggcgtggttttatcgatggtgctatcgaggagggcacccgcgcagcggttactgtaattgaggaactgcgtcctgcgcctgcggtgcgttcccacctg

SEQ ID NO: 844 - protein, 495 aa, synthetic construct
  REGION 1..495: note = Variant of monoamine oxidase
MTSRDGYQWTPETGLTQGVPSLGVISPPTNIEDTDKDGPWDVIVIGGGYCGLTATRDLTVAGFKTLLLEARDRIGGRSWSSNIDGYPYEMGGTWVHWHQSHVWREITRYKMHNALSPSFNFSRGVNHFQLRTNPTTSTYMTHEASAELMRSALHKFTNVDGTNGRTVLPFPHDMFYVPEFRKYDEMSYSERIDQIRDELSLNERSSLEAFILLCSGGTLENSSFGEFLHWWAMSGYTYQGCMDCLISYKVKDGQSAFARRFWEEAAGTGRLGYVFGTPVRSVVNERDAVRVTARDGREFAAKRLVCTIPLNVLSSVHFSPPLSPQRMAAANIGHVNQCVKVHAEVSDKDMRSWSGISYPFNKLAYAIGDGTTPAGNTHIVCLGGAHNHIQPEEDVEATKMAVENMSPGNMDIKRLVFHNWCKDEFAKGAWFFAPPQLLSKSLDELRARHGNVLFANSDWALGWRGFIDGAIEEGTRAAVTVIEELRPAPAVRSHL

SEQ ID NO: 845 - DNA, 1485 bp, synthetic construct
  misc_feature 1..1485: note = Variant of monoamine oxidase
  source 1..1485: mol_type = other DNA
atgaccagccgcgacggctatcagtggaccccggaaacgggtctgacccagggcgtaccgtccctgggtgtcatttcgccgccgactaacatcgaagataccgataaggacgggccttgggatgtcattgtcattgggggcgggtattgtgggctgaccgcaacccgtgatttaaccgtcgcagggttcaagacgctgctgctggaggcccgtgatcgtattggtggccgctcctggagcagtaatattgacggttacccgtatgagatgggtggcacttgggttcattggcatcaatctcacgtgtggcgtgaaatcacgcgttataaaatgcacaacgcgctgtctccatcatttaacttttcacgtggcgtgaatcacttccaactgcgtaccaatccgaccaccagtacgtacatgacgcacgaagcggaggatgaactgctgcgtagcgcattgcataaattcaccaatgtcgacggcactaatggccgtacagtgttgccgttcccacatgatatgttttatgtgccggaatttcgcaagtatgacgaaatgtcatattccgaacgcattgaccagatccgcgacgaactgtctttgaacgaacgctctagtttagaggctttcattttattatgtagcggtggcaccctggaaaactccagctttggtgaatttctgcattggtgggcaatgtcgggttacacgtatcagggctgtatggattgtttaatctcctataaatttaaggatggccagagtgcgttcgcgcgtcgcttctgggaagaagccgctggcactggccgtctgggctatgtctttggttgtccggtgcgttctgtggtgaatgaacgcgacgcagtacgtgttaccgcacgtgacggtcgcgaattcgcagcgaaacgtttggtttgcacgattccgctgaacgtattgagttctgttcattttagcccaccactgtccccgcaacgcatggccgctgcgaacattggccatgttaaccagtgcgtcaaagtgcatgcggaagtcagttgtccggatatgcgttcatggtcgggtatctcctatccgttcaacaaattagcctacgctatcggcgatggcacgaccccagcgggtaatacgcatattgtgtgccttgggggggccgagaatcatatccagccggaagaggacgtggaagcaacgaagatggccgttgaaaacatgtcgcctgggaatatggatatcaaacgtctggtcttccacaactggtgcaaggatgaatttgccaaaggcgcgtggttcttcgcccctccacagctgctgtcaaagagcctggatgaactgcgctgccgtcacggtaatgtcctgtttgcaaactccgattgggccttaggttggcgtggttttatcgatggtgctatcgaggagggcacccgcgcagcggttactgtaattgaggaactgcgtcctgcgcctgcggtgcgttcccacctg

SEQ ID NO: 846 - protein, 495 aa, synthetic construct; identical to SEQ ID NO: 110
  REGION 1..495: note = Variant of monoamine oxidase

SEQ ID NO: 847 - DNA, 1485 bp, synthetic construct
  misc_feature 1..1485: note = Variant of monoamine oxidase
  source 1..1485: mol_type = other DNA
atgaccagccgcgacggctatcagtggaccccggaaacgggtctgacccagggcgtaccgtccctgggtgtcatttcgccgccgactaacatcgaagataccgataaggacgggccttgggatgtcattgtcattgggggcgggtattgtgggctgaccgcaacccgtgatttaaccgtcgcagggttcaagacgctgctgctggaggcccgtgatcgtattggtggccgctcctggagcagtaatattgacggttacccgtatgagatgggtggcacttgggttcattggcatcaaccgcacgtgtggcgtgaaatcacgcgttataaaatgcacaacgcgctgtctccatcatttaacttttcacgtggcgtgaatcacttccaactgcgtaccaatccgaccaccagtacgtacatgacgcacgaagcggaggatgaactgctgcgtagcgcattgcataaattcaccaatgtcgacggcactaatggccgtacagtgttgccgttcccacatgatatgttttatgtgccggaatttcgcaagtatgacgaaatgtcatattccgaacgcattgaccagatccgcgacgaactgtctttgaacgaacgctctagtttagaggctttcattttattatgtagcggtggcaccctggaaaactccagctttggtgaatttctgcattggtgggcaatgtcgggttacacgtatcagggctgtatggattgtttaatctcctataaatttaaggatggccagagtgcgttcgcgcgtcgcttctgggaagaagccgctggcactggccgtctgggctatgtctttggtactccggtgcgttctgtggtgaacgaacgcgacgcagtacgtgttaccgcacgtgacggtcgcgaattcgcagcgaaacgtttggtttgcacgattccgctgaacgtattgagttctgttcattttagcccaccactgtccccgcaacgcatggccgctgcgaacattggccatgttaaccagtgcgtcaaagtgcatgcggaagtcagttgcaaggatatgcgttcatggtcgggtatctcctatccgttcaacaaattagcctacgctatcggcgatggcacgaccccagcgggtaatacgcatattgtgtgccttgggggggcccataatcatatccagccggaagaggacgtggaagcaacgaagatggccgttgaaaacatgtcgcctgggaatatggatatcaaacgtctggtcttccacaactggtgcaaggatgaatttgccaaaggcgcgtggttcttcgcccctccacagctgctgtcaaagagcctggatgaactgcgctgtcgtcacggtaatgtcctgtttgcaaactccgattgggccttaggttggcgtggttttatcgatggtgctatcgaggagggcacccgcgcagcggttactgtaattgaggaactgcgtcctgcgcctgcggtgcgttcccacctg

SEQ ID NO: 848 - protein, 495 aa, synthetic construct
  REGION 1..495: note = Variant of monoamine oxidase
MTSRDGYQWTPETGLTQGVPSLGVISPPTNIEDTDKDGPWDVIVIGGGYCGLTATRDLTVAGFKTLLLEARDRIGGRSWSSNIDGYPYEMGGTWVHWHQPHVWREITRYKMHNALSPSFNFSRGVNHFQLRTNPTTSTYMTHEAEDELLRSALHKFTNVDGTNGRTVLPFPHDMFYVPEFRKYDEMSYSERIDQIRDELSLNERSSLEAFILLCSGGTLENSSFGEFLHWWAMSGYTYQGCMDCLISYKFKDGQSAFARRFWEEAAGTGRLGYVFGTPVRSVVNERDAVRVTARDGREFAAKRLVCTIPLNVLSSVHFSPPLSPQRMAAANIGHVNQCVKVHAEVSCKDMRSWSGISYPFNKLAYAIGDGTTPAGNTHIVCLGGAHNHIQPEEDVEATKMAVENMSPGNMDIKRLVFHNWCKDEFAKGAWFFAPPQLLSKSLDELRCRHGNVLFANSDWALGWRGFIDGAIEEGTRAAVTVIEELRPAPAVRSHL

SEQ ID NO: 849 - DNA, 1485 bp, synthetic construct
  misc_feature 1..1485: note = Variant of monoamine oxidase
  source 1..1485: mol_type = other DNA
atgaccagccgcgacggctatcagtggaccccggaaacgggtctgacccagggcgtaccgtccctgggtgtcatttcgccgccgactaacatcgaagataccgataaggacgggccttgggatgtcattgtcattgggggcgggtattgtgggctgaccgcaacccgtgatttaaccgtcgcagggttcaagacgctgctgctggaggcccgtgatcgtattggtggccgctcctggagcagtaatattgacggttacccgtatgagatgggtggcacttgggttcattggcatcaatcgcacgtgtggcgtgaaatcacgcgttataaaatgcacaacgcgctgtctccatcatttaacttttcacgtggcgtgaatcacttccaactgcgtaccaatccgaccaccagtacgtacatgacgcacgaagcggaggctgaactgatgcgttgcgcattgcataaattcaccaatgtcgacggcactaatggccgtacagtgttgccgttcccacatgatatgttttatgtgccggaatttcgcaagtatgacgaaatgtcatattccgaacgcattgaccagatccgcgacgaactgtctttgaacgaacgctctagtttagaggctttcattttattatgtagcggtggcaccctggaaaactccagctttggtgaatttctgcattggtgggcaatgtcgggttacacgtatcagggctgtatggattgtttaatgtcctataaatttaaggatggccagagtgcgttcgcgcgtcgcttctgggaagaagccgctggcactggccgtctgggctatgtctttggttgtccggtgcgttctgtggtgaacgaacgcgacgcagtacgtgttaccgcacgtgacggtcgcgaattcgcagcgaaacgtttggtttgcacgattccgctgaacgtattgagttctgttcattttagcccaccactgtccccgcaacgcatggccgctgcgaacattggccatgttaaccagtgcgtcaaagtgcatgcggaagtcagttgcaaggatatgcgttcatggtcgggtatctcctatccgttcaacaaattagcctacgctatcggcgatggcacgaccccagcgggtaatacgcatattgtgtgccttgggggggcccataatcatatccagccggaagaggacgtggaagcaacgaagatggccgttgaaaacatgtcgcctgggaatatggatatcaaacgtctggtcttccacaactggtgcaaggatgaatttgccaaaggcgcgtggttcttcgcccctccacagctgctgtcaaagagcctggatgaactgcgctgccgtcacggtaatgtcctgtttgcaaactccgattgggccttaggttggcgtggttttatcgatggtgctatcgaggagggcacccgcgcagcggttactgtaattgaggaactgcgtcctgcgcctgcggtgcgttcccacctg

SEQ ID NO: 850 - protein, 495 aa, synthetic construct
  REGION 1..495: note = Variant of monoamine oxidase
MTSRDGYQWTPETGLTQGVPSLGVISPPTNIEDTDKDGPWDVIVIGGGYCGLTATRDLTVAGFKTLLLEARDRIGGRSWSSNIDGYPYEMGGTWVHWHQSHVWREITRYKMHNALSPSFNFSRGVNHFQLRTNPTTSTYMTHEAEAELMRCALHKFTNVDGTNGRTVLPFPHDMFYVPEFRKYDEMSYSERIDQIRDELSLNERSSLEAFILLCSGGTLENSSFGEFLHWWAMSGYTYQGCMDCLMSYKFKDGQSAFARRFWEEAAGTGRLGYVFGCPVRSVVNERDAVRVTARDGREFAAKRLVCTIPLNVLSSVHFSPPLSPQRMAAANIGHVNQCVKVHAEVSCKDMRSWSGISYPFNKLAYAIGDGTTPAGNTHIVCLGGAHNHIQPEEDVEATKMAVENMSPGNMDIKRLVFHNWCKDEFAKGAWFFAPPQLLSKSLDELRCRHGNVLFANSDWALGWRGFIDGAIEEGTRAAVTVIEELRPAPAVRSHL

SEQ ID NO: 851 - DNA, 1485 bp, synthetic construct
  misc_feature 1..1485: note = Variant of monoamine oxidase
  source 1..1485: mol_type = other DNA
atgaccagccgcgacggctatcagtggaccccggaaacgggtctgacccagggcgtaccgtccctgggtgtcatttcgccgccgactaacatcgaagataccgataaggacgggccttgggatgtcattgtcattgggggcgggtattgtgggctgaccgcaacccgtgatttaaccgtcgcagggttcaagacgctgctgctggaggcccgtgatcgtattggtggccgctcctggagcagtaatattgacggttacccgtatgagatgggtggcacttgggttcattggcatcaaccgcacgtgtggcgtgaaatcacgcgttataaaatgcacaacgcgctgtctccatcatttaacttttcacgtggcgtgaatcacttccaactgcgtaccaatccgaccaccagtacgtacatgacgcacgaagcggaggatgaactgctgcgtagcgcattgcataaattcaccaatgtcgacggcactaatggccgtacagtgttgccgttcccacatgatatgttttatgtgccggaatttcgcaagtatgacgaaatgtcatattccgaacgcattgaccagatccgcgacgatctgtctttgaacgaacgcactagtttagaggctttcattttattatgtagcggtggcaccctggaaaactccagctttggtgaatttctgcattggtgggcaatgtcgggttacacgtatcagggctgtatggattgtttaatctcctataaatttaaggatggccagagtgcgttcgcgcgtcgcttctgggaagaagccgctggcactggccgtctgggctatgtctttggttgcccggtgcgttctgtggtgaacgaacgcgacgcagtacgtgttaccgcacgtgacggtcgcgaattcgcagcgaaacgtttggtttgcacgattccgctgaacgtattgagttctgttcattttagcccaccactgtccccgcaacgcatggccgctgcgaacattggccatgttaaccagtgcgtcaaagtgcatgcggaagtcagttgcaaggatatgcgttcatggtcgggtatctcctatccgttcaacaaattagcctacgctatcggcgatggcacgaccccagcgggtaatacgcatattgtgtgccttgggggggcccataatcatatccagccggaagaggacgtggaagcaacgaagatggccgttgaaaacatgtcgcctgggaatatggatatcaaacgtctggtcttccacaactggtgcaaggatgaatttgccaaaggcgcgtggttcttcgcccctccacagctgctgtcaaagagcctggatgaactgcgctgccgtcacggtaatgtcctgtttgcaaactccgattgggccttaggttggcgtggttttatcgatggtgctatcgaggagggcacccgcgcagcggttactgtaattgaggaactgcgtcctgcgcctgcggtgcgttcccacctg

SEQ ID NO: 852 - protein, 495 aa, synthetic construct
  REGION 1..495: note = Variant of monoamine oxidase
MTSRDGYQWTPETGLTQGVPSLGVISPPTNIEDTDKDGPWDVIVIGGGYCGLTATRDLTVAGFKTLLLEARDRIGGRSWSSNIDGYPYEMGGTWVHWHQPHVWREITRYKMHNALSPSFNFSRGVNHFQLRTNPTTSTYMTHEAEDELLRSALHKFTNVDGTNGRTVLPFPHDMFYVPEFRKYDEMSYSERIDQIRDDLSLNERTSLEAFILLCSGGTLENSSFGEFLHWWAMSGYTYQGCMDCLISYKFKDGQSAFARRFWEEAAGTGRLGYVFGCPVRSVVNERDAVRVTARDGREFAAKRLVCTIPLNVLSSVHFSPPLSPQRMAAANIGHVNQCVKVHAEVSCKDMRSWSGISYPFNKLAYAIGDGTTPAGNTHIVCLGGAHNHIQPEEDVEATKMAVENMSPGNMDIKRLVFHNWCKDEFAKGAWFFAPPQLLSKSLDELRCRHGNVLFANSDWALGWRGFIDGAIEEGTRAAVTVIEELRPAPAVRSHL

SEQ ID NO: 853 - DNA, 1485 bp, synthetic construct
  misc_feature 1..1485: note = Variant of monoamine oxidase
  source 1..1485: mol_type = other DNA
atgaccagccgcgacggctatcagtggaccccggaaacgggtctgacccagggcgtaccgtccctgggtgtcatttcgccgccgactaacatcgaagataccgataaggacgggccttgggatgtcattgtcattgggggcgggtattgtgggctgaccgcaacccgtgatttaaccgtcgcagggttcaagacgctgctgctggaggcccgtgatcgtattggtggccgctccgacagcagtaatattgacggttacccgtatgagatgggtggcggctgggttcattggcatcaatctcacgtgtggcgtgaaatcacgcgttataaaatgcacaacgcgctgtctccatcatttaacttttcacgtggcgtgaatcacttccaactgcgtaccaatccgaccaccagtacgtacatgacgcacgaagcggaggatgaactgctgcgtagcgcattgcataaattcaccaatgtcgacggcactaatggccgtacagtgttgccgttcccacatgatatgttttatgtgccggaatttcgcaagtatgatgaaatgtcatattccgaacgcattgaccagatccgcgacgaactgtctttgaacgaacgctctagtttagaggctttcattttattatgtagcggtggcaccctggaaaactccagctttggtgaatttctgcattggtgggcaatgtcgggttacacgtatcagggctgtatggattgtttaatctcctataaatttaaggatggccagagtgcgttcgcgcgtcgcttctgggaagaagccgctggcactggccgtctgggctatgtctttggttgtccggtgcgttctgtggtgaacgaacgcgacgcagtacgtgttaccgcacgtgacggtcgcgaattcgcagcgaaacgtttggtttgcacgattccgctgaacgtattgagttctgttcattttagcccaccactgtccccgcaacgcatggccgctgcgaacattggccatgttaaccagtgcgtcaaagtgcatgcggaagtcagttgtccggatatgcgttcatggtcgggtatctcctatccgttcaacaaattagcctacgctatcggcgatggcacgaccccagcgggtaatacgcatattgtgtgccttgggggggcccataatcatatccagccggaagaggacgtggaagcaacgaagatggccgttgaaaacatgtcgcctgggaatatggatatcaaacgtctggtcttccacaactggtgcaaggatgaatttgccaaaggcgcgtggttcttcgcccctccacagctgctgtcaaagagcctggatgaactgcgctgccgtcacggtaatgtcctgtttgcaaactccgattgggccttaggttggcgtggttttatcgatggtgctatcgaggagggcacccgcgcagcggttactgtaattgaggaactgcgtcctgcgcctgcggtgcgttcccacctg

SEQ ID NO: 854 - protein, 495 aa, synthetic construct
  REGION 1..495: note = Variant of monoamine oxidase
MTSRDGYQWTPETGLTQGVPSLGVISPPTNIEDTDKDGPWDVIVIGGGYCGLTATRDLTVAGFKTLLLEARDRIGGRSDSSNIDGYPYEMGGGWVHWHQSHVWREITRYKMHNALSPSFNFSRGVNHFQLRTNPTTSTYMTHEAEDELLRSALHKFTNVDGTNGRTVLPFPHDMFYVPEFRKYDEMSYSERIDQIRDELSLNERSSLEAFILLCSGGTLENSSFGEFLHWWAMSGYTYQGCMDCLISYKFKDGQSAFARRFWEEAAGTGRLGYVFGCPVRSVVNERDAVRVTARDGREFAAKRLVCTIPLNVLSSVHFSPPLSPQRMAAANIGHVNQCVKVHAEVSCPDMRSWSGISYPFNKLAYAIGDGTTPAGNTHIVCLGGAHNHIQPEEDVEATKMAVENMSPGNMDIKRLVFHNWCKDEFAKGAWFFAPPQLLSKSLDELRCRHGNVLFANSDWALGWRGFIDGAIEEGTRAAVTVIEELRPAPAVRSHL

SEQ ID NO: 855 - DNA, 1485 bp, synthetic construct
  misc_feature 1..1485: note = Variant of monoamine oxidase
  source 1..1485: mol_type = other DNA
atgaccagccgcgacggctatcagtggaccccggaaacgggtctgacccagggcgtaccgtccctgggtgtcatttcgccgccgactaacatcgaagataccgataaggacgggccttgggatgtcattgtcattgggggcgggtattgtgggctgaccgcaacccgtgatttaaccgtcgcagggttcaagacgctgctgctggaggcccgtgatcgtattggtggccgctcctggagcagtaatattgacggttacccgtatgagatgggtggcacttgggttcattggcatcaatctcacgtgtggcgtgaaatcacgcgttataaaatgcacaacgcgctgtctccatcatttaacttttcacgtggcgtgaatcacttccaactgcgtaccaatccgaccaccagtacgtacatgacgcacgaagcggaggatgaactgctgcgtagcgcattgcataaattcaccaatgtcgacggcactaatggccgtacagtgttgccgttcccacatgatatgttttatgtgccggaatttcgcaagtatgacgaaatgtcatattccgaacgcattgaccagatccgcgacgaactgtctttgaacgaacgctctagtttagaggctttcattttattatgtagcggtggcaccctggaaaactccagctttggtgaatttctgcattggtgggcaatgtcgggttacacgcgtcagggctgtatggattgtttaatctcctataaatttaaggatggccagagtgcgttcgcgcgtcgcttctgggaagaagccgctggcactggccgtctgggctatgtctttggttgtccggtgcgttctgtggtgaacgaacgcgacgcagtacgtgttaccgcacgtgacggtcgcgaattcgcagcgaaacgtttggtttgcacgattccgctgaacgtattgagttctgttcattttagcccaccactgtccccgcaacgcatggccgctgcgaacatcggccatgttaaccagtgcgtcaaagtgcatgcggaagtcagttgtccggatatgcgttcatggtcgggtatctcctatccgttcaacaaattagcctacgctatcggcgatggcacgaccccagcgggtaatacgcatattgtgtgccttgggggggcccataatcatatccagccggaagaggacgtggaagcaacgaagatggccgttgaaaacatgtcgcctgggaatatggatatcaaacgtctggtcttccacaactggtgcaaggatgaatttgccaaaggcgcgtggttcttcgcccctccacagctgctgtcaaagagcctggatgaactgcgctgccgtcacggtaatgtcctgtttgcaaactccgattgggccttaggttggcgtggttttatcgatggtgctatcgaggagggcacccgcgcagcggttactgtaattgaggaactgcgtcctgcgcctgcggtgcgttcccacctg

SEQ ID NO: 856 - protein, 495 aa, synthetic construct; identical to SEQ ID NO: 60
  REGION 1..495: note = Variant of monoamine oxidase

SEQ ID NO: 857 - DNA, 1485 bp, synthetic construct; identical to SEQ ID NO: 63
  misc_feature 1..1485: note = Variant of monoamine oxidase
  source 1..1485: mol_type = other DNA

SEQ ID NO: 858 - protein, 495 aa, synthetic construct; identical to SEQ ID NO: 64
  REGION 1..495: note = Variant of monoamine oxidase

SEQ ID NO: 859 - DNA, 1485 bp, synthetic construct; identical to SEQ ID NO: 9
  misc_feature 1..1485: note = Variant of monoamine oxidase
  source 1..1485: mol_type = other DNA

SEQ ID NO: 860 - protein, 495 aa, synthetic construct; identical to SEQ ID NO: 10
  REGION 1..495: note = Variant of monoamine oxidase

SEQ ID NO: 861 - DNA, 1485 bp, synthetic construct
  misc_feature 1..1485: note = Variant of monoamine oxidase
  source 1..1485: mol_type = other DNA
atgaccagccgcgacggctatcagtggaccccggaaacgggtctgacccagggcgtaccgtccctgggtgtcatttcgccgccgactaacatcgaagataccgataaggacgggccttgggatgtcattgtcattgggggcgggtattgtgggctgaccgcaacccgtgatttaaccgtcgcagggttcaagacgctgctgctggaggcccgtgatcgtattggtggccgctcctggagcagtaatattgacggttacccgtatgagatgggtggcacttgggttcattggcatcaatcgcacgtgtggcgtgaaatcacgcgttataaaatgcacaacgcgctgtctccatcatttaacttttcacgtggcgtgaatcacttccaactgcgtaccaatccgaccaccagtacgtacatgacgcacgaagcgtcggatgaactgatgcgtagcgcattgcataaattcaccaatgtcgacggcactaatggccgtacagtgttgccgttcccacatgatatgttttatgtgccggaatttcgcaagtatgacgaaatgtcatattccgaacgcattgaccagatccgcgacgaactgtctttgaacgaacgctctagtttagaggctttcattttattatgtagcggtggcaccctggaaaactccagctttggtgaatttctgcattggtgggcaatgtcgggttacacgtatcagggctgtatggattgtttaatttcctataaatttaaggatggccagagtgcgttcgcgcgtcgcttctgggaagaagccgctggcactggccgtctgggctatgtctttggttgtccggtgcgttctgtggtgaacgaacgcgacgcagtacgtgttaccgcacgtgacggtcgcgaattcgcagcgaaacgtttggtttgcacgattccgctgaacgtattgagttctgttcattttagcccaccactgtccccgcaacgcatggccgctgcgaacattggccatgttaaccagtgcgtcaaagtgcatgcggaagtcagttgtccggatatgcgttcatggtcgggtatctcctatccgttcaacaaattagcctacgctatcggcgatggcacgaccccagcgggtaatacgcatattgtgtgccttgggggggcccataatcatatccagccggaagaggacgtggaagcaacgaagatggccgttgaaaacatgtcgcctgggaatatggatatcaaacgtctggtcttccacaactggtgcaaggatgaatttgccaaaggcgcgtggttcttcgcccctccacagctgctgtcaaagagcctggatgaactgcgcgcacgtcacggtaatgtcctgtttgcaaactccgattgggccttaggttggcgtggttttatcgatggtgctatcgaggagggcacccgcgcagcggttactgtaattgaggaactgcgtcctgcgcctgcggtgcgttcccacctg

SEQ ID NO: 862 - protein, 495 aa, synthetic construct
  REGION 1..495: note = Variant of monoamine oxidase
MTSRDGYQWTPETGLTQGVPSLGVISPPTNIEDTDKDGPWDVIVIGGGYCGLTATRDLTVAGFKTLLLEARDRIGGRSWSSNIDGYPYEMGGTWVHWHQSHVWREITRYKMHNALSPSFNFSRGVNHFQLRTNPTTSTYMTHEASDELMRSALHKFTNVDGTNGRTVLPFPHDMFYVPEFRKYDEMSYSERIDQIRDELSLNERSSLEAFILLCSGGTLENSSFGEFLHWWAMSGYTYQGCMDCLISYKFKDGQSAFARRFWEEAAGTGRLGYVFGCPVRSVVNERDAVRVTARDGREFAAKRLVCTIPLNVLSSVHFSPPLSPQRMAAANIGHVNQCVKVHAEVSCPDMRSWSGISYPFNKLAYAIGDGTTPAGNTHIVCLGGAHNHIQPEEDVEATKMAVENMSPGNMDIKRLVFHNWCKDEFAKGAWFFAPPQLLSKSLDELRARHGNVLFANSDWALGWRGFIDGAIEEGTRAAVTVIEELRPAPAVRSHL

SEQ ID NO: 863 - DNA, 1485 bp, synthetic construct
  misc_feature 1..1485: note = Variant of monoamine oxidase
  source 1..1485: mol_type = other DNA
atgaccagccgcgacggctatcagtggaccccggaaacgggtctgacccagggcgtaccgtccctgggtgtcatttcgccgccgactaacatcgaagataccgataaggacgggccttgggatgtcattgtcattgggggcgggtattgtgggctgaccgcaacccgtgatttaaccgtcgcagggttcaagacgctgctgctggaggcccgtgatcgtattggtggccgctcctggagcagtaatattgacggttacccgtatgagatgggtggcacttgggttcattggcatcaaccgcacgtgtggcgtgaaatcacgcgttataaaatgcacaacgcgctgtctccatcatttaacttttcacgtggcgtgaatcacttccaactgcgtaccaatccgaccaccagtacgtacatgacgcacgaagcggaggatgaactgctgcgtagcgcattgcataaattcaccaatgtcgacggcactaatggccgtacagtgttgccgttcccacatgatatgttttatgtgccggaatttcgcaagtatgacgaaatgtcatattccgaacgcattgaccagatccgcgacgaactgtctttgaacgaacgctctagtttagaggctttcattttattatgtagcggtggcaccctggaaaactccagctttggtgaatttctgcattggtgggcaatgtcgggttacacgtatcagggctgtatggattgtttaatctcctataaatttaaggatggccagagtgcgttcgcgcgtcgcttctgggaagaagccgctggcactggccgtctgggctatgtctttggttgcccggtgcgttctgtggtgaacgaacgcgacgcagtacgtgttaccgcacgtgacggtcgcgaattcgcagcgaaacgtttggtttgcacgattccgctgaacgtattgagttctgttcattttagcccaccactgtccccgcaacgcatggccgctgcgaacattggccatgttaaccagtgcgtcaaagtgcatgcggaagtcagttgcccagatatgcgttcatggtcgggtatctcctatccgttcaacaaattagcctacgctatcggcgatggcacgaccccagcgggtaatacgcatattgtgtgccttgggggggcccataatcatatccagccggaagaggacgtggaagcaacgaagatggccgttgaaaacatgtcgcctgggaatatggatatcaaacgtctggtcttccacaactggtgcaaggatgaatttgccaaaggcgcgtggttcttcgcccctccacagctgctgtcaaagagcctggatgaactgcgctgtcgtcacggtaatgtcctgtttgcaaactccgattgggccttaggttggcgtggttttatcgatggtgctatcgaggagggcacccgcgcagcggttactgtaattgaggaactgcgtcctgcgcctgcggtgcgttcccacctg

SEQ ID NO: 864 - protein, 495 aa, synthetic construct; identical to SEQ ID NO: 298
  REGION 1..495: note = Variant of monoamine oxidase

SEQ ID NO: 865 - DNA, 1485 bp, synthetic construct
  misc_feature 1..1485: note = Variant of monoamine oxidase
  source 1..1485: mol_type = other DNA
atgaccagccgcgacggctatcagtggaccccggaaacgggtctgacccagggcgtaccgtccctgggtgtcatttcgccgccgactaacatcgaagataccgataaggacgggccttgggatgtcattgtcattgggggcgggtattgtgggctgaccgcaacccgtgatttaaccgtcgcagggttcaagacgctgctgctggaggcccgtgatcgtattggtggccgctcctggagcagtaatattgacggttacccgtatgagatgggtggcacttgggttcattggcatcaaccgcacgtgtggcgtgaaatcacgcgttataaaatgcacaacgcgctgtctccatcatttaacttttcacgtggcgtgaatcacttccaactgcgtaccaatccgaccaccagtacgtacatgacgcacgaagcggaggatgaactgatgcgtagcgcattgcataaattcaccaatgtcgacggcactaatggccgtacagtgttgccgttcccacatgatatgttttatgtgccggaatttcgcaagtatgacgaaatgtcatattccgaacgcattgaccagatccgcgacgatctgtctttgaacgaacgctctagtttagaggctttcattttattatgtagcggtggcaccctggaaaactccagctttggtgaatttctgcattggtgggcaatgtcgggttacacgtatcagggctgtatggattgtttaatctcctataaatttaaggatggccagagtgcgttcgcgcgtcgcttctgggaagaagccgctggcactggccgtctgggctatgtctttggttgcccggtgcgttctgtggtgaacgaacgcgacgcagtacgtgttaccgcacgtgacggtcgcgaattcgcagcgaaacgtttggtttgcacgattccgctgaacgtattgagttctgttcattttagcccaccactgtccccgcaacgcatggccgctgcgaacattggccatgttaaccagtgcgtcaaagtgcatgcggaagtcagttgtccggatatgcgttcatggtcgggtatctcctatccgttcaacaaattagcctacgctatcggcgatggcacgaccccagcgggtaatacgcatattgtgtgccttgggggggcccataatcatatccagccggaagaggacgtggaagcaacgaagatggccgttgaaaacatgtcgcctgggaatatggatatcaaacgtctggtcttccacaactggtgcaaggatgaatttgccaaaggcgcgtggttcttcgcccctccacagctgctgtcaaagagcctggatgaactgcgctgtcgtcacggtaatgtcctgtttgcaaactccgattgggccttaggttggcgtggttttatcgatggtgctatcgaggagggcacccgcgcagcggttactgtaattgaggaactgcgtcctgcgcctgcggtgcgttcccacctg

SEQ ID NO: 866 - protein, 495 aa, synthetic construct
  REGION 1..495: note = Variant of monoamine oxidase
MTSRDGYQWTPETGLTQGVPSLGVISPPTNIEDTDKDGPWDVIVIGGGYCGLTATRDLTVAGFKTLLLEARDRIGGRSWSSNIDGYPYEMGGTWVHWHQPHVWREITRYKMHNALSPSFNFSRGVNHFQLRTNPTTSTYMTHEAEDELMRSALHKFTNVDGTNGRTVLPFPHDMFYVPEFRKYDEMSYSERIDQIRDDLSLNERSSLEAFILLCSGGTLENSSFGEFLHWWAMSGYTYQGCMDCLISYKFKDGQSAFARRFWEEAAGTGRLGYVFGCPVRSVVNERDAVRVTARDGREFAAKRLVCTIPLNVLSSVHFSPPLSPQRMAAANIGHVNQCVKVHAEVSCPDMRSWSGISYPFNKLAYAIGDGTTPAGNTHIVCLGGAHNHIQPEEDVEATKMAVENMSPGNMDIKRLVFHNWCKDEFAKGAWFFAPPQLLSKSLDELRCRHGNVLFANSDWALGWRGFIDGAIEEGTRAAVTVIEELRPAPAVRSHL

SEQ ID NO: 867 - DNA, 1485 bp, synthetic construct
  misc_feature 1..1485: note = Variant of monoamine oxidase
  source 1..1485: mol_type = other DNA
atgaccagccgcgacggctatcagtggaccccggaaacgggtctgacccagggcgtaccgtccctgggtgtcatttcgccgccgactaacatcgaagataccgataaggacgggccttgggatgtcattgtcattgggggcgggtattgtgggctgaccgcaacccgtgatttaaccgtcgcagggttcaagacgctgctgctggaggcccgtgatcgtattggtggccgctcctggagcagtaatattgacggttacccgtatgagatgggtggcacttgggttcattggcatcaaccgcacgtgtggcgtgaaatcacgcgttataaaatgcacaacgcgctgtctccatcatttaacttttcacgtggcgtgaatcacttccaactgcgtaccaatccgaccaccagtacgtacatgacgcacgaagcggaggatgaactgctgcgtagcgcattgcataaattcaccaatgtcgacggcactaatggccgtacagtgttgccgttcccacatgatatgttttatgtgccggaatttcgcaagtatgacgaaatgtcatattccgaacgcattgaccagatccgcgacgaactgtctttgaacgaacgctctagtttagaggctttcattttattatgtagcggtggcaccctggaaaactccagctttggtgaatttctgcattggtgggcaatgtcgggttacacgtatcagggctgtattgattgtttaatttcctataaatttaaggatggccagagtgcgttcgcgcgtcgcttctgggaagaagccgctggcactggccgtctgggctatgtctttggtactccggtgcgttctgtggtgaacgaacgcgacgcagtacgtgttaccgcacgtgacggtcgcgaattcgcagcgaaacgtttggtttgcacgattccgctgaacgtattgagttctgttcattttagcccaccactgtccccgcaacgcatggccgctgcgaacattggccatgttaaccagtgcgtcaaagtgcatgcggaagtcagttgcaaggatatgcgttcatggtcgggtatctcctatccgttcaacaaattagcctacgctatcggcgatggcacgaccccagcgggtaatacgcatattgtgtgccttgggggggcccataatcatatccagccggaagaggacgtggaagcaacgaagatggccgttgaaaacatgtcgcctgggaatatggatatcaaacgtctggtcttccacaactggtgcaaggatgaatttgccaaaggcgcgtggttcttcgcccctccacagctgctgtcaaagagcctggatgaactgcgctgtcgtcacggtaatgtcctgtttgcaaactccgattgggccttaggttggcgtggttttatcgatggtgctatcgaggagggcacccgcgcagcggttactgtaattgaggaactgcgtcctgcgcctgcggtgcgttcccacctg

SEQ ID NO: 868 - protein, 495 aa, synthetic construct
  REGION 1..495: note = Variant of monoamine oxidase
MTSRDGYQWTPETGLTQGVPSLGVISPPTNIEDTDKDGPWDVIVIGGGYCGLTATRDLTVAGFKTLLLEARDRIGGRSWSSNIDGYPYEMGGTWVHWHQPHVWREITRYKMHNALSPSFNFSRGVNHFQLRTNPTTSTYMTHEAEDELLRSALHKFTNVDGTNGRTVLPFPHDMFYVPEFRKYDEMSYSERIDQIRDELSLNERSSLEAFILLCSGGTLENSSFGEFLHWWAMSGYTYQGCIDCLISYKFKDGQSAFARRFWEEAAGTGRLGYVFGTPVRSVVNERDAVRVTARDGREFAAKRLVCTIPLNVLSSVHFSPPLSPQRMAAANIGHVNQCVKVHAEVSCKDMRSWSGISYPFNKLAYAIGDGTTPAGNTHIVCLGGAHNHIQPEEDVEATKMAVENMSPGNMDIKRLVFHNWCKDEFAKGAWFFAPPQLLSKSLDELRCRHGNVLFANSDWALGWRGFIDGAIEEGTRAAVTVIEELRPAPAVRSHL

SEQ ID NO: 869 - DNA, 1485 bp, synthetic construct
  misc_feature 1..1485: note = Variant of monoamine oxidase
  source 1..1485: mol_type = other DNA
atgaccagccgcgacggctatcagtggaccccggaaacgggtctgacccagggcgtaccgtccctgggtgtcatttcgccgccgactaacatcgaagataccgataaggacgggccttgggatgtcattgtcattgggggcgggtattgtgggctgaccgcaacccgtgatttaaccgtcgcagggttcaagacgctgctgctggaggcccgtgatcgtattggtggccgctcctggagcagtaatattgacggttacccgtatgagatgggtggcacttgggttcattggcatcaatcgcacgtgtggcgtgaaatcacgcgttataaaatgcacaacgcgctgtctccatcatttaacttttcacgtggcgtgaatcacttccaactgcgtaccaatccgaccaccagtacgtacatgacgcacgaagcggaggatgaactgctgcgtagcgcattgcataaattcaccaatgtcgacggcactaatggccgtacagtgttgccgttcccacatgatatgttttatgtgccggaatttcgcaagtatgacgaaatgtcatattccgaacgcattgaccagatccgcgacgaactgtctttgaacgaacgctctagtttagaggctttcattttattatgtagcggtggcaccctggaaaactccagctttggtgaatttctgcattggtgggcaatgtcgggttacacgtatcagggctgtattgattgtttaatttcctataaatttaaggatggccagagtgcgttcgcgcgtcgcttctgggaagaagccgctggcactggccgtctgggctatgtctttggttgcccggtgcgttctgtggtgaacgaacgcgacgcagtacgtgttaccgcacgtgacggtcgcgaattcgcagcgaaacgtttggtttgcacgattccgctgaacgtattgagttctgttcattttagcccaccactgtccccgcaacgcatggccgctgcgaacattggccatgttaaccagtgcgtcaaagtgcatgcggaagtcagttgtccggatatgcgttcatggtcgggtatctcctatccgttcaacaaattagcctacgctatcggcgatggcacgaccccagcgggtaatacgcatattgtgtgccttgggggggcccataatcatatccagccggaagaggacgtggaagcaacgaagatggccgttgaaaacatgtcgcctgggaatatggatatcaaacgtctggtcttccacaactggtgcaaggatgaatttgccaaaggcgcgtggttcttcgcccctccacagctgctgtcaaagagcctggatgaactgcgctgccgtcacggtaatgtcctgtttgcaaactccgattgggccttaggttggcgtggttttatcgatggtgctatcgaggagggcacccgcgcagcggttactgtaattgaggaactgcgtcctgcgcctgcggtgcgttcccacctg

SEQ ID NO: 870 - protein, 495 aa, synthetic construct; identical to SEQ ID NO: 106
  REGION 1..495: note = Variant of monoamine oxidase

SEQ ID NO: 871 - DNA, 1485 bp, synthetic construct
  misc_feature 1..1485: note = Variant of monoamine oxidase
  source 1..1485: mol_type = other DNA
atgaccagccgcgacggctatcagtggaccccggaaacgggtctgacccagggcgtaccgtccctgggtgtcatttcgccgccgactaacatcgaagataccgataaggacgggccttgggatgtcattgtcattgggggcgggtattgtgggctgaccgcaacccgtgatttaaccgtcgcagggttcaagacgctgctgctggaggcccgtgatcgtattggtggccgctcctgggtgagtaatattgacggttacccgtatgagatgggtggcacttgggttcattggcatcaatctcacgtgtggcgtgaaatcacgcgttataaaatgcacaacgcgctgtctccatcatttaacttttcacgtggcgtgaatcacttccaactgcgtaccaatccgaccaccagtacgtacatgacgcacgaagcggaggatgaactgctgcgtagcgcattgcataaattcaccaatgtcgacggcactaatggccgtacagtgttgccgttcccacatgatatgttttatgtgccggaatttcgcaagtatgatgaaatgtcatattccgaacgcattgaccagatccgcgacgaactgtctttgaacgaacgctctagtttagaggctttcattttattatgtagcggtggcaccctggaaaactccagctttggtgaatttctgcattggtgggcaatgtcgggttacacgtaccagggctgtatggattgtttaatctcctataaatttaaggatggccagagtgcgttcgcgcgtcgcttctgggaagaagccgctggcactggccgtctgggctatgtctttggttgtccggtgcgttctgtggtgaacgaacgcgacgcagtacgtgttaccgcacgtgacggtcgcgaattcgcagcgaaacgtttggtttgcacgattccgctgaacgtattgagttctgttcattttagcccaccactgtccccgcaacgcatggccgctgcgaacatcggccatgttaaccagtgcgtcaaagtgcatgcggaagtcagttgtccggatatgcgttcatggtcgggtatctcctatccgttcaacaaattagcctacgctatcggcgatggcacgaccccagcgggtaatacgcatattgtgtgccttgggggggccgagaatcatatccagccggaagaggacgtggaagcaacgaagatggccgttgaaaacatgtcgcctgggaatatggatatcaaacgtctggtcttccacaactggtgcaaggatgaatttgccaaaggcgcgtggttcttcgcccctccacagctgctgtcaaagagcctggatgaactgcgctgccgtcacggtaatgtcctgtttgcaaactccgattgggccttaggttggcgtggttttatcgatggtgctatcgaggagggcacccgcgcagcggttactgtaattgaggaactgcgtcctgcgcctgcggtgcgttcccacctg

SEQ ID NO: 872 - protein, 495 aa, synthetic construct
  REGION 1..495: note = Variant of monoamine oxidase
MTSRDGYQWTPETGLTQGVPSLGVISPPTNIEDTDKDGPWDVIVIGGGYCGLTATRDLTVAGFKTLLLEARDRIGGRSWVSNIDGYPYEMGGTWVHWHQSHVWREITRYKMHNALSPSFNFSRGVNHFQLRTNPTTSTYMTHEAEDELLRSALHKFTNVDGTNGRTVLPFPHDMFYVPEFRKYDEMSYSERIDQIRDELSLNERSSLEAFILLCSGGTLENSSFGEFLHWWAMSGYTYQGCMDCLISYKFKDGQSAFARRFWEEAAGTGRLGYVFGCPVRSVVNERDAVRVTARDGREFAAKRLVCTIPLNVLSSVHFSPPLSPQRMAAANIGHVNQCVKVHAEVSCPDMRSWSGISYPFNKLAYAIGDGTTPAGNTHIVCLGGAENHIQPEEDVEATKMAVENMSPGNMDIKRLVFHNWCKDEFAKGAWFFAPPQLLSKSLDELRCRHGNVLFANSDWALGWRGFIDGAIEEGTRAAVTVIEELRPAPAVRSHL

SEQ ID NO: 873 - DNA, 1485 bp, synthetic construct
  misc_feature 1..1485: note = Variant of monoamine oxidase
  source 1..1485: mol_type = other DNA
atgaccagccgcgacggctatcagtggaccccggaaacgggtctgacccagggcgtaccgtccctgggtgtcatttcgccgccgactaacatcgaagataccgataaggacgggccttgggatgtcattgtcattgggggcgggtattgtgggctgaccgcaacccgtgatttaaccgtcgcagggttcaagacgctgctgctggaggcccgtgatcgtattggtggccgctcctggagcagtaatattgacggttacccgtatgagatgggtggcacttgggttcattggcatcaaccgcacgtgtggcgtgaaatcacgcgttataaaatgcacaacgcgctgtctccatcatttaacttttcacgtggcgtgaatcacttccaactgcgtaccaatccgaccaccagtacgtacatgacgcacgaagcggaggatgaactgctgcgtagcgcattgcataaattcaccaatgtcgacggcactaatggccgtacagtgttgccgttcccacatgatatgttttatgtgccggaatttcgcaagtatgacgaaatgtcatattccgaacgcattgaccagatccgcgacgaactgtctttgaacgaacgctctagtttagaggctttcattttattatgtagcggtggcaccctggaaaactccagctttggtgaatttctgcattggtgggcaatgtcgggttacacgtatcagggctgtatggattgtttaatgtcctataaatttaaggatggccagagtgcgttcgcgcgtcgcttctgggaagaagccgctggcactggccgtctgggctatgtctttggtactccggtgcgttctgtggtgaacgaacgcgacgcagtacgtgttaccgcacgtgacggtcgcgaattcgcagcgaaacgtttggtttgcacgattccgctgaacgtattgagttctgttcattttagcccaccactgtccccgcaacgcatggccgctgcgaacattggccatgttaaccagtgcgtcaaagtgcatgcggaagtcagttgcaaggatatgcgttcatggtcgggtatctcctatccgttcaacaaattagcctacgctatcggcgatggcacgaccccagcgggtaatacgcatattgtgtgccttgggggggcccataatcatatccagccggaagaggacgtggaagcaacgaagatggccgttgaaaacatgtcgcctgggaatatggatatcaaacgtctggtcttccacaactggtgcaaggatgaatttgccaaaggcgcgtggttcttcgcccctccacagctgctgtcaaagagcctggatgaacgtcgctgtcgtcacggtaatgtcctgtttgcaaactccgattgggccttaggttggcgtggttttatcgatggtgctatcgaggagggcacccgcgcagcggttactgtaattgaggaactgcgtcctgcgcctgcggtgcgttcccacctg

SEQ ID NO: 874 - protein, 495 aa, synthetic construct
  REGION 1..495: note = Variant of monoamine oxidase
MTSRDGYQWTPETGLTQGVPSLGVISPPTNIEDTDKDGPWDVIVIGGGYCGLTATRDLTVAGFKTLLLEARDRIGGRSWSSNIDGYPYEMGGTWVHWHQPHVWREITRYKMHNALSPSFNFSRGVNHFQLRTNPTTSTYMTHEAEDELLRSALHKFTNVDGTNGRTVLPFPHDMFYVPEFRKYDEMSYSERIDQIRDELSLNERSSLEAFILLCSGGTLENSSFGEFLHWWAMSGYTYQGCMDCLMSYKFKDGQSAFARRFWEEAAGTGRLGYVFGTPVRSVVNERDAVRVTARDGREFAAKRLVCTIPLNVLSSVHFSPPLSPQRMAAANIGHVNQCVKVHAEVSCKDMRSWSGISYPFNKLAYAIGDGTTPAGNTHIVCLGGAHNHIQPEEDVEATKMAVENMSPGNMDIKRLVFHNWCKDEFAKGAWFFAPPQLLSKSLDERRCRHGNVLFANSDWALGWRGFIDGAIEEGTRAAVTVIEELRPAPAVRSHL

SEQ ID NO: 875 - DNA, 1485 bp, synthetic construct
  misc_feature 1..1485: note = Variant of monoamine oxidase
  source 1..1485: mol_type = other DNA
atgaccagccgcgacggctatcagtggaccccggaaacgggtctgacccagggcgtaccgtccctgggtgtcatttcgccgccgactaacatcgaagataccgataaggacgggccttgggatgtcattgtcattgggggcgggtattgtgggctgaccgcaacccgtgatttaaccgtcgcagggttcaagacgctgctgctggaggcccgtgatcgtattggtggccgctccgccagcagtaatattgacggttacccgtatgagatgggtggcggctgggttcattggcatcaatctcacgtgtggcgtgaaatcacgcgttataaaatgcacaacgcgctgtctccatcatttaacttttcacgtggcgtgaatcacttccaactgcgtaccaatccgaccaccagtacgtacatgacgcacgaagcggaggatgaactgctgcgtagcgcattgcataaattcaccaatgtcgacggcactaatggccgtacagtgttgccgttcccacatgatatgttttatgtgccggaatttcgcaagtatgacgaaatgtcatattccgaacgcattgaccagatccgcgacgaactgtctttgaacgaacgctctagtttagaggctttcattttattatgtagcggtggcaccctggaaaactccagctttggtgaatttctgcattggtgggcaatgtcgggttacacgcgtcagggctgtatggattgtttaatctcctataaatttaaggatggccagagtgcgttcgcgcgtcgcttctgggaagaagccgctggcactggccgtctgggctatgtctttggttgtccggtgcgttctgtggtgaatgaacgcgacgcagtacgtgttaccgcacgtgacggtcgcgaattcgcagcgaaacgtttggtttgcacgattccgctgaacgtattgagttctgttcattttagcccaccactgtccccgcaacgcatggccgctgcgaacattggccatgttaaccagtgcgtcaaagtgcatgcggaagtcagttgtccggatatgcgttcatggtcgggtatctcctatccgttcaacaaattagcctacgctatcggcgatggcacgaccccagcgggtaatacgcatattgtgtgccttgggggggccgagaatcatatccagccggaagaggacgtggaagcaacgaagatggccgttgaaaacatgtcgcctgggaatatggatatcaaacgtctggtcttccacaactggtgcaaggatgaatttgccaaaggcgggtggttcttcgcccctccacagctgctgtcaaagagcctggatgaactgcgctgccgtcacggtaatgtcctgtttgcaaactccgattgggccttaggttggcgtggttttatcgatggtgctatcgaggagggcacccgcgcagcggttactgtaattgaggaactgcgtcctgcgcctgcggtgcgttcccacctg

SEQ ID NO: 876 - protein, 495 aa, synthetic construct
  REGION 1..495: note = Variant of monoamine oxidase
MTSRDGYQWTPETGLTQGVPSLGVISPPTNIEDTDKDGPWDVIVIGGGYCGLTATRDLTVAGFKTLLLEARDRIGGRSASSNIDGYPYEMGGGWVHWHQSHVWREITRYKMHNALSPSFNFSRGVNHFQLRTNPTTSTYMTHEAEDELLRSALHKFTNVDGTNGRTVLPFPHDMFYVPEFRKYDEMSYSERIDQIRDELSLNERSSLEAFILLCSGGTLENSSFGEFLHWWAMSGYTRQGCMDCLISYKFKDGQSAFARRFWEEAAGTGRLGYVFGCPVRSVVNERDAVRVTARDGREFAAKRLVCTIPLNVLSSVHFSPPLSPQRMAAANIGHVNQCVKVHAEVSCPDMRSWSGISYPFNKLAYAIGDGTTPAGNTHIVCLGGAENHIQPEEDVEATKMAVENMSPGNMDIKRLVFHNWCKDEFAKGGWFFAPPQLLSKSLDELRCRHGNVLFANSDWALGWRGFIDGAIEEGTRAAVTVIEELRPAPAVRSHL

SEQ ID NO: 877 - DNA, 1485 bp, synthetic construct
  misc_feature 1..1485: note = Variant of monoamine oxidase
  source 1..1485: mol_type = other DNA
atgaccagccgcgacggctatcagtggaccccggaaacgggtctgacccagggcgtaccgtccctgggtgtcatttcgccgccgactaacatcgaagataccgataaggacgggccttgggatgtcattgtcattgggggcgggtattgtgggctgaccgcaacccgtgatttaaccgtcgcagggttcaagacgctgctgctggaggcccgtgatcgtattggtggccgctccgccagcagtaatattgacggttacccgtatgagatgggtggcacttgggttcattggcatcaatctcacgtgtggcgtgaaatcacgcgttataaaatgcacaacgcgctgtctccatcatttaacttttcacgtggcgtgaatcacttccaactgcgtaccaatccgaccaccagtacgtacatgacgcacgaagcggaggatgaactgctgcgtagcgcattgcataaattcaccaatgtcgacggcactaatggccgtacagtgttgccgttcccacatgatatgttttatgtgccggaatttcgcaagtatgacgaaatgtcatattccgaacgcattgaccagatccgcgacgaactgtctttgaacgaacgctctagtttagaggctttcattttattatgtagcggtggcaccctggaaaactccagctttggtgaatttctgcattggtgggcaatgtcgggttacacgcgtcagggctgtatggattgtttaatctcctataaatttaaggatggccagagtgcgttcgcgcgtcgcttctgggaagaagccgctggcactggccgtctgggctatgtctttggttgtccggtgcgttctgtggtgaatgaacgcgacgcagtacgtgttaccgcacgtgacggtcgcgaattcgcagcgaaacgtttggtttgcacgattccgctgaacgtattgagttctgttcattttagcccaccactgtccccgcaacgcatggccgctgcgaacggcggccatgttaaccagtgcgtcaaagtgcatgcggaagtcagttgtccggatatgcgttcatggtcgggtatctcctatccgttcaacaaattagcctacgctatcggcgatggcacgaccccagcgggtaatacgcatattgtgtgccttgggggggcccataatcatatccagccggaagaggacgtggaagcaacgaagatggccgttgaaaacatgtcgcctgggaatatggatatcaaacgtctggtcttccacaactggtgcaaggatgaatttgccaaaggcgggtggttcttcgcccctccacagctgctgtcaaagagcctggatgaactgcgctgccgtcacggtaatgtcctgtttgcaaactccgattgggccttaggttggcgtggttttatcgatggtgctatcgaggagggcacccgcgcagcggttactgtaattgaggaactgcgtcctgcgcctgcggtgcgttcccacctg

SEQ ID NO: 878 - protein, 495 aa, synthetic construct
  REGION 1..495: note = Variant of monoamine oxidase
MTSRDGYQWTPETGLTQGVPSLGVISPPTNIEDTDKDGPWDVIVIGGGYCGLTATRDLTVAGFKTLLLEARDRIGGRSASSNIDGYPYEMGGTWVHWHQSHVWREITRYKMHNALSPSFNFSRGVNHFQLRTNPTTSTYMTHEAEDELLRSALHKFTNVDGTNGRTVLPFPHDMFYVPEFRKYDEMSYSERIDQIRDELSLNERSSLEAFILLCSGGTLENSSFGEFLHWWAMSGYTRQGCMDCLISYKFKDGQSAFARRFWEEAAGTGRLGYVFGCPVRSVVNERDAVRVTARDGREFAAKRLVCTIPLNVLSSVHFSPPLSPQRMAAANGGHVNQCVKVHAEVSCPDMRSWSGISYPFNKLAYAIGDGTTPAGNTHIVCLGGAHNHIQPEEDVEATKMAVENMSPGNMDIKRLVFHNWCKDEFAKGGWFFAPPQLLSKSLDELRCRHGNVLFANSDWALGWRGFIDGAIEEGTRAAVTVIEELRPAPAVRSHL

SEQ ID NO: 879 - DNA, 1485 bp, synthetic construct
  misc_feature 1..1485: note = Variant of monoamine oxidase
  source 1..1485: mol_type = other DNA
atgaccagccgcgacggctatcagtggaccccggaaacgggtctgacccagggcgtaccgtccctgggtgtcatttcgccgccgactaacatcgaagataccgataaggacgggccttgggatgtcattgtcattgggggcgggtattgtgggctgaccgcaacccgtgatttaaccgtcgcagggttcaagacgctgctgctggaggcccgtgatcgtattggtggccgctcctggagcagtaatattgacggttacccgtatgagatgggtggcacttgggttcattggcatcaatcgcacgtgtggcgtgaaatcacgcgttataaaatgcacaacgcgctgtctccatcatttaacttttcacgtggcgtgaatcacttccaactgcgtaccaatccgaccaccagtacgtacatgacgcacgaagcggaggatgaactgctgcgtagcgcattgcataaattcaccaatgtcgacggcactaatggccgtacagtgttgccgttcccacatgatatgttttatgtgccggaatttcgcaagtatgacgaaatgtcatattccgaacgcattgaccagatccgcgacgaactgtctttgaacgaacgctctagtttagaggctttcattttattatgtagcggtggcaccctggaaaactccagctttggtgaatttctgcattggtgggcaatgtcgggttacacgtatcagggctgtatggattgtttaatgtcctataaatttaaggatggccagagtgcgttcgcgcgtcgcttctgggaagaagccgctggcactggccgtctgggctatgtctttggttgcccggtgcgttctgtggtgaacgaacgcgacgcagtacgtgttaccgcacgtgacggtcgcgaattcgcagcgaaacgtttggtttgcacgattccgctgaacgtattgagttctgttcattttagcccaccactgtccccgcaacgcatggccgctgcgaacattggccatgttaaccagtgcgtcaaagtgcatgcggaagtcagttgcccagatatgcgttcatggtcgggtatctcctatccgttcaacaaattagcctacgctatcggcgatggcacgaccccagcgggtaatacgcatattgtgtgccttgggggggcccataatcatatccagccggaagaggacgtggaagcaacgaagatggccgttgaaaacatgtcgcctgggaatatggatatcaaacgtctggtcttccacaactggtgcaaggatgaatttgccaaaggcgcgtggttcttcgcccctccacagctgctgtcaaagagcctggatgaactgcgctgtcgtcacggtaatgtcctgtttgcaaactccgattgggccttaggttggcgtggttttatcgatggtgctatcgaggagggcacccgcgcagcggttactgtaattgaggaactgcgtcctgcgcctgcggtgcgttcccacctg

SEQ ID NO: 880 - protein, 495 aa, synthetic construct; identical to SEQ ID NO: 192
  REGION 1..495: note = Variant of monoamine oxidase

SEQ ID NO: 881 - DNA, 1485 bp, synthetic construct
  misc_feature 1..1485: note = Variant of monoamine oxidase
  source 1..1485: mol_type = other DNA
atgaccagccgcgacggctatcagtggaccccggaaacgggtctgacccagggcgtaccgtccctgggtgtcatttcgccgccgactaacatcgaagataccgataaggacgggccttgggatgtcattgtcattgggggcgggtattgtgggctgaccgcaacccgtgatttaaccgtcgcagggttcaagacgctgctgctggaggcccgtgatcgtattggtggccgctcctgggtgagtaatattgacggttacccgtatgagatgggtggcacctgggttcattggcatcaatctcacgtgtggcgtgaaatcacgcgttataaaatgcacaacgcgctgtctccatcatttaacttttcacgtggcgtgaatcacttccaactgcgtaccaatccgaccaccagtacgtacatgacgcacgaagcggaggatgaactgctgcgtagcgcattgcataaattcaccaatgtcgacggcactaatggccgtacagtgttgccgttcccacatgatatgttttatgtgccggaatttcgcaagtatgatgaaatgtcatattccgaacgcattgaccagatccgcgacgaactgtctttgaacgaacgctctagtttagaggctttcattttattatgtagcggtggcaccctggaaaactccagctttggtgaatttctgcattggtgggcaatgtcgggttacacgtaccagggctgtatggattgtttaatctcctataaatttaaggatggccagagtgcgttcgcgcgtcgcttctgggaagaagccgctggcactggccgtctgggctatgtctttggttgtccggtgcgttctgtggtggatgaacgcgacgcagtacgtgttaccgcacgtgacggtcgcgaattcgcagcgaaacgtttggtttgcacgattccgctgaacgtattgagttctgttcattttagcccaccactgtccccgcaacgcatggccgctgcgaacatcggccatgttaaccagtgcgtcaaagtgcatgcggaagtcagttgtccggatatgcgttcatggtcgggtatctcctatccgttcaacaaattagcctacgctatcggcgatggcacgaccccagcgggtaatacgcatattgtgtgccttgggggggccgagaatcatatccagccggaagaggacgtggaagcaacgaagatggccgttgaaaacatgtcgcctgggaatatggatatcaaacgtctggtcttccacaactggtgcaaggatgaatttgccaaaggcgcgtggttcttcgcccctccacagctgctgtcaaagagcctggatgaactgcgctgccgtcacggtaatgtcctgtttgcaaactccgattgggccttaggttggcgtggttttatcgatggtgctatcgaggagggcacccgcgcagcggttactgtaattgaggaactgcgtcctgcgcctgcggtgcgttcccacctg

SEQ ID NO: 882 - protein, 495 aa, synthetic construct
  REGION 1..495: note = Variant of monoamine oxidase
MTSRDGYQWTPETGLTQGVPSLGVISPPTNIEDTDKDGPWDVIVIGGGYCGLTATRDLTVAGFKTLLLEARDRIGGRSWVSNIDGYPYEMGGTWVHWHQSHVWREITRYKMHNALSPSFNFSRGVNHFQLRTNPTTSTYMTHEAEDELLRSALHKFTNVDGTNGRTVLPFPHDMFYVPEFRKYDEMSYSERIDQIRDELSLNERSSLEAFILLCSGGTLENSSFGEFLHWWAMSGYTYQGCMDCLISYKFKDGQSAFARRFWEEAAGTGRLGYVFGCPVRSVVDERDAVRVTARDGREFAAKRLVCTIPLNVLSSVHFSPPLSPQRMAAANIGHVNQCVKVHAEVSCPDMRSWSGISYPFNKLAYAIGDGTTPAGNTHIVCLGGAENHIQPEEDVEATKMAVENMSPGNMDIKRLVFHNWCKDEFAKGAWFFAPPQLLSKSLDELRCRHGNVLFANSDWALGWRGFIDGAIEEGTRAAVTVIEELRPAPAVRSHL

SEQ ID NO: 883 - DNA, 1485 bp, synthetic construct
  misc_feature 1..1485: note = Variant of monoamine oxidase
  source 1..1485: mol_type = other DNA
atgaccagccgcgacggctatcagtggaccccggaaacgggtctgacccagggcgtaccgtccctgggtgtcatttcgccgccgactaacatcgaagataccgataaggacgggccttgggatgtcattgtcattgggggcgggtattgtgggctgaccgcaacccgtgatttaaccgtcgcagggttcaagacgctgctgctggaggcccgtgatcgtattggtggccgctcctggagcagtaatattgacggttacccgtatgagatgggtggcacttgggttcattggcatcaatctcacgtgtggcgtgaaatcacgcgttataaaatgcacaacgcgctgtctccatcatttaacttttcacgtggcgtgaatcacttccaactgcgtaccaatccgaccaccagtacgtacatgacgcacgaagcggaggatgaactgctgcgtagcgcattgcataaattcaccaatgtcgacggcactaatggccgtacagtgttgccgttcccacatgatatgttttatgtgccggaatttcgcaagtatgacgaaatgtcatattccgaacgcattgaccagatccgcgacgaactgtctttgaacgaacgctctagtttagaggctttcattttattatgtagcggtggcaccctggaaaactccagctttggtgaatttctgcattggtgggcaatgtcgggttacacgtatcagggctgtatggattgtttaatctcctataaatttaaggatggccagagtgcgttcgcgcgtcgcttctgggaagaagccgctggcactggccgtctgggctatgtctttggttgtccggtgcgttctgtggtgaacgaacgcgacgcagtacgtgttaccgcacgtgacggtcgcgaattcgcagcgaaacgtttggtttgcacgattccgctgaacgtattgagttctgttcattttagcccaccactgtccccgcaacgcatggccgctgcgaacattggccatgttaaccagggcgtcaaagtgcatgcggaagtcagttgtccggatatgcgttcatggtcgggtatctcctatccgttcaacaaattagcctacgctatcggcgatggcacgaccccagcgggtaatacgcatattgtgtgccttgggggggcccataatcatatccagccggaagaggacgtggaagcaacgaagatggccgttgaaaacatgtcgcctgggaatatggatatcaaacgtctggtcttccataactggtgcaaggatgaatttgccaaaggcgcgtggttcttcgcccctccacagctgctgtcaaagagcctggatgaactgcgctgccgtcacggtaatgtcctgtttgcaaactccgattgggccttaggttggcgtggttttatcgatggtgctatcgaggagggcacccgcgcagcggttactgtaattgaggaactgcgtcctgcgcctgcggtgcgttcccacctg

SEQ ID NO: 884 - protein, 495 aa, synthetic construct; identical to SEQ ID NO: 70
  REGION 1..495: note = Variant of monoamine oxidase

SEQ ID NO: 885 - DNA, 1485 bp, synthetic construct
  misc_feature 1..1485: note = Variant of monoamine oxidase
  source 1..1485: mol_type = other DNA
atgaccagccgcgacggctatcagtggaccccggaaacgggtctgacccagggcgtaccgtccctgggtgtcatttcgccgccgactaacatcgaagataccgataaggacgggccttgggatgtcattgtcattgggggcgggtattgtgggctgaccgcaacccgtgatttaaccgtcgcagggttcaagacgctgctgctggaggcccgtgatcgtattggtggccgctcctggagcagtaatattgacggttacccgtatgagatgggtggcggctgggttcattggcatcaatctcacgtgtggcgtgaaatcacgcgttataaaatgcacaacgcgctgtctccatcatttaacttttcacgtggcgtgaatcacttccaactgcgtaccaatccgaccaccagtacgtacatgacgcacgaagcggaggatgaactgctgcgtagcgcattgcataaattcaccaatgtcgacggcactaatggccgtacagtgttgccgttcccacatgatatgttttatgtgccggaatttcgcaagtatgacgaaatgtcatattccgaacgcattgaccagatccgcgacgaactgtctttgaacgaacgctctagtttagaggctttcattttattatgtagcggtggcaccctggaaaactccagctttggtgaatttctgcattggtgggcaatgtcgggttacacgcgtcagggctgtatggattgtttaatctcctataaatttaaggatggccagagtgcgttcgcgcgtcgcttctgggaagaagccgctggcactggccgtctgggctatgtctttggttgtccggtgcgttctgtggtgaacgaacgcgacgcagtacgtgttaccgcacgtgacggtcgcgaattcgcagcgaaacgtttggtttgcacgattccgctgaacgtattgagttctgttcattttagcccaccactgtccccgcaacgcatggccgctgcgaacatcggccatgttaaccagtgcgtcaaagtgcatgcggaagtcagttgtccggatatgcgttcatggtcgggtatctcctatccgttcaacaaattagcctacgctatcggcgatggcacgaccccagcgggtaatacgcatattgtgtgccttgggggggccgagaatcatatccagccggaagaggacgtggaagcaacgaagatggccgttgaaaacatgtcgcctgggaatatggatatcaaacgtctggtcttccacaactggtgcaaggatgaatttgccaaaggcgcgtggttcttcgcccctccacagctgctgtcaaagagcctggatgaactgcgctgccgtcacggtaatgtcctgtttgcaaactccgattgggccttaggttggcgtggttttatcgatggtgctatcgaggagggcacccgcgcagcggttactgtaattgaggaactgcgtcctgcgcctgcggtgcgttcccacctg

SEQ ID NO: 886 - protein, 495 aa, synthetic construct
  REGION 1..495: note = Variant of monoamine oxidase
MTSRDGYQWTPETGLTQGVPSLGVISPPTNIEDTDKDGPWDVIVIGGGYCGLTATRDLTVAGFKTLLLEARDRIGGRSWSSNIDGYPYEMGGGWVHWHQSHVWREITRYKMHNALSPSFNFSRGVNHFQLRTNPTTSTYMTHEAEDELLRSALHKFTNVDGTNGRTVLPFPHDMFYVPEFRKYDEMSYSERIDQIRDELSLNERSSLEAFILLCSGGTLENSSFGEFLHWWAMSGYTRQGCMDCLISYKFKDGQSAFARRFWEEAAGTGRLGYVFGCPVRSVVNERDAVRVTARDGREFAAKRLVCTIPLNVLSSVHFSPPLSPQRMAAANIGHVNQCVKVHAEVSCPDMRSWSGISYPFNKLAYAIGDGTTPAGNTHIVCLGGAENHIQPEEDVEATKMAVENMSPGNMDIKRLVFHNWCKDEFAKGAWFFAPPQLLSKSLDELRCRHGNVLFANSDWALGWRGFIDGAIEEGTRAAVTVIEELRPAPAVRSHL

SEQ ID NO: 887 - DNA, 1485 bp, synthetic construct
  misc_feature 1..1485: note = Variant of monoamine oxidase
  source 1..1485: mol_type = other DNA
atgaccagccgcgacggctatcagtggaccccggaaacgggtctgacccagggcgtaccgtccctgggtgtcatttcgccgccgactaacatcgaagataccgataaggacgggccttgggatgtcattgtcattgggggcgggtattgtgggctgaccgcaacccgtgatttaaccgtcgcagggttcaagacgctgctgctggaggcccgtgatcgtattggtggccgctcctggagcagtaatattgacggttacccgtatgagatgggtggcacttgggttcattggcatcaatcgcacgtgtggcgtgaaatcacgcgttataaaatgcacaacgcgctgtctccatcatttaacttttcacgtggcgtgaatcacttccaactgcgtaccaatccgaccaccagtacgtacatgacgcacgaagcggaggatgaactgctgcgtagcgcattgcataaattcaccaatgtcgacggcactaatggccgtacagtgttgccgttcccacatgatatgttttatgtgccggaatttcgcaagtatgacgaaatgtcatattccgaacgcattgaccagatccgcgacgaactgtctttgaacgaacgcactagtttagaggctttcattttattatgtagcggtggcaccctggaaaactccagctttggtgaatttctgcattggtgggcaatgtcgggttacacgtatcagggctgtatggattgtttaatctcctataaatttaagggtggccagagtgcgttcgcgcgtcgcttctgggaagaagccgctggcactggccgtctgggctatgtctttggttgcccggtgcgttctgtggtgaacgaacgcgacgcagtacgtgttaccgcacgtgacggtcgcgaattcgcagcgaaacgtttggtttgcacgattccgctgaacgtattgagttctgttcattttagcccaccactgtccccgcaacgcatggccgctgcgaacattggccatgttaaccagtgcgtcaaagtgcatgcggaagtcagtgacccagatatgcgttcatggtcgggtatctcctatccgttcaacaaattagcctacgctatcggcgatggcacgaccccagcgggtaatacgcatattgtgtgccttgggggggcccataatcatatccagccggaagaggacgtggaagcaacgaagatggccgttgaaaacatgtcgcctgggaatatggatatcaaacgtctggtcttccacaactggtgcaaggatgaatttgccaaaggcgcgtggttcttcgcccctccacagctgctgtcaaagagcctggatgaacgtcgcgcacgtcacggtaatgtcctgtttgcaaactccgattgggccttaggttggcgtggttttatcgatggtgctatcgaggagggcacccgcgcagcggttactgtaattgaggaactgcgtcctgcgcctgcggtgcgttcccacctg

SEQ ID NO: 888 - protein, 495 aa, synthetic construct
  REGION 1..495: note = Variant of monoamine oxidase
MTSRDGYQWTPETGLTQGVPSLGVISPPTNIEDTDKDGPWDVIVIGGGYCGLTATRDLTVAGFKTLLLEARDRIGGRSWSSNIDGYPYEMGGTWVHWHQSHVWREITRYKMHNALSPSFNFSRGVNHFQLRTNPTTSTYMTHEAEDELLRSALHKFTNVDGTNGRTVLPFPHDMFYVPEFRKYDEMSYSERIDQIRDELSLNERTSLEAFILLCSGGTLENSSFGEFLHWWAMSGYTYQGCMDCLISYKFKGGQSAFARRFWEEAAGTGRLGYVFGCPVRSVVNERDAVRVTARDGREFAAKRLVCTIPLNVLSSVHFSPPLSPQRMAAANIGHVNQCVKVHAEVSDPDMRSWSGISYPFNKLAYAIGDGTTPAGNTHIVCLGGAHNHIQPEEDVEATKMAVENMSPGNMDIKRLVFHNWCKDEFAKGAWFFAPPQLLSKSLDERRARHGNVLFANSDWALGWRGFIDGAIEEGTRAAVTVIEELRPAPAVRSHL

SEQ ID NO: 889 - DNA, 1485 bp, synthetic construct
  misc_feature 1..1485: note = Variant of monoamine oxidase
  source 1..1485: mol_type = other DNA
atgaccagccgcgacggctatcagtggaccccggaaacgggtctgacccagggcgtaccgtccctgggtgtcatttcgccgccgactaacatcgaagataccgataaggacgggccttgggatgtcattgtcattgggggcgggtattgtgggctgaccgcaacccgtgatttaaccgtcgcagggttcaagacgctgctgctggaggcccgtgatcgtattggtggccgctccgccagcagtaatattgacggttacccgtatgagatgggtggcacttgggttcattggcatcaatctcacgtgtggcgtgaaatcacgcgttataaaatgcacaacgcgctgtctccatcatttaacttttcacgtggcgtgaatcacttccaactgcgtaccaatccgaccaccagtacgtacatgacgcacgaagcggaggatgaactgctgcgtagcgcattgcataaattcaccaatgtcgacggcactaatggccgtacagtgttgccgttcccacatgatatgttttatgtgccggaatttcgcaagtatgacgaaatgtcatattccgaacgcattgaccagatccgcgacgaactgtctttgaacgaacgctctagtttagaggctttcattttattatgtagcggtggcaccctggaaaactccagctttggtgaatttctgcattggtgggcaatgtcgggttacacgcgtcagggctgtatggattgtttaatctcctataaatttaaggatggccagagtgcgttcgcgcgtcgcttctgggaagaagccgctggcactggccgtctgggctatgtctttggttgtccggtgcgttctgtggtgaacgaacgcgacgcagtacgtgttaccgcacgtgacggtcgcgaattcgcagcgaaacgtttggtttgcacgattccgctgaacgtattgagttctgttcattttagcccaccactgtccccgcaacgcatggccgctgcgaacattggccatgttaaccagtgcgtcaaagtgcatgcggaagtcagttgtccggatatgcgttcatggtcgggtatctcctatccgttcaacaaattagcctacgctatcggcgatggcacgaccccagcgggtaatacgcatattgtgtgccttgggggggcccataatcatatccagccggaagaggacgtggaagcaacgaagatggccgttgaaaacatgtcgcctgggaatatggatatcaaacgtctggtcttccacaactggtgcaaggatgaatttgccaaaggcgggtggttcttcgcccctccacagctgctgtcaaagagcctggatgaactgcgctgccgtcacggtaatgtcctgtttgcaaactccgattgggccttaggttggcgtggttttatcgatggtgctatcgaggagggcacccgcgcagcggttactgtaattgaggaactgcgtcctgcgcctgcggtgcgttcccacctg

SEQ ID NO: 890 - protein, 495 aa, synthetic construct
  REGION 1..495: note = Variant of monoamine oxidase
MTSRDGYQWTPETGLTQGVPSLGVISPPTNIEDTDKDGPWDVIVIGGGYCGLTATRDLTVAGFKTLLLEARDRIGGRSASSNIDGYPYEMGGTWVHWHQSHVWREITRYKMHNALSPSFNFSRGVNHFQLRTNPTTSTYMTHEAEDELLRSALHKFTNVDGTNGRTVLPFPHDMFYVPEFRKYDEMSYSERIDQIRDELSLNERSSLEAFILLCSGGTLENSSFGEFLHWWAMSGYTRQGCMDCLISYKFKDGQSAFARRFWEEAAGTGRLGYVFGCPVRSVVNERDAVRVTARDGREFAAKRLVCTIPLNVLSSVHFSPPLSPQRMAAANIGHVNQCVKVHAEVSCPDMRSWSGISYPFNKLAYAIGDGTTPAGNTHIVCLGGAHNHIQPEEDVEATKMAVENMSPGNMDIKRLVFHNWCKDEFAKGGWFFAPPQLLSKSLDELRCRHGNVLFANSDWALGWRGFIDGAIEEGTRAAVTVIEELRPAPAVRSHL

SEQ ID NO: 891 - DNA, 1485 bp, synthetic construct
  misc_feature 1..1485: note = Variant of monoamine oxidase
  source 1..1485: mol_type = other DNA
atgaccagccgcgacggctatcagtggaccccggaaacgggtctgacccagggcgtaccgtccctgggtgtcatttcgccgccgactaacatcgaagataccgataaggacgggccttgggatgtcattgtcattgggggcgggtattgtgggctgaccgcaacccgtgatttaaccgtcgcagggttcaagacgctgctgctggaggcccgtgatcgtattggtggccgctcctggagcagtaatattgacggttacccgtatgagatgggtggcacttgggttcattggcatcaatcgcacgtgtggcgtgaaatcacgcgttataaaatgcacaacgcgctgtctccatcatttaacttttcacgtggcgtgaatcacttccaactgcgtaccaatccgaccaccagtacgtacatgacgcacgaagcgtcggctgaactgctgcgtagcgcattgcataaattcaccaatgtcgacggcactaatggccgtacagtgttgccgttcccacatgatatgttttatgtgccggaatttcgcaagtatgacgaaatgtcatattccgaacgcattgaccagatccgcgacgatctgtctttgaacgaacgcactagtttagaggctttcattttattatgtagcggtggcaccctggaaaactccagctttggtgaatttctgcattggtgggcaatgtcgggttacacgtatcagggctgtattgattgtttaatttcctataaatttaaggatggccagagtgcgttcgcgcgtcgcttctgggaagaagccgctggcactggccgtctgggctatgtctttggtactccggtgcgttctgtggtgaacgaacgcgacgcagtacgtgttaccgcacgtgacggtcgcgaattcgcagcgaaacgtttggtttgcacgattccgctgaacgtattgagttctgttcattttagcccaccactgtccccgcaacgcatggccgctgcgaacattggccatgttaaccagtgcgtcaaagtgcatgcggaagtcagttgcaaggatatgcgttcatggtcgggtatctcctatccgttcaacaaattagcctacgctatcggcgatggcacgaccccagcgggtaatacgcatattgtgtgccttgggggggcccataatcatatccagccggaagaggacgtggaagcaacgaagatggccgttgaaaacatgtcgcctgggaatatggatatcaaacgtctggtcttccacaactggtgcaaggatgaatttgccaaaggcgcgtggttcttcgcccctccacagctgctgtcaaagagcctggatgaactgcgcgcacgtcacggtaatgtcctgtttgcaaactccgattgggccttaggttggcgtggttttatcgatggtgctatcgaggagggcacccgcgcagcggttactgtaattgaggaactgcgtcctgcgcctgcggtgcgttcccacctg

SEQ ID NO: 892 - protein, 495 aa, synthetic construct
  REGION 1..495: note = Variant of monoamine oxidase
MTSRDGYQWTPETGLTQGVPSLGVISPPTNIEDTDKDGPWDVIVIGGGYCGLTATRDLTVAGFKTLLLEARDRIGGRSWSSNIDGYPYEMGGTWVHWHQSHVWREITRYKMHNALSPSFNFSRGVNHFQLRTNPTTSTYMTHEASAELLRSALHKFTNVDGTNGRTVLPFPHDMFYVPEFRKYDEMSYSERIDQIRDDLSLNERTSLEAFILLCSGGTLENSSFGEFLHWWAMSGYTYQGCIDCLISYKFKDGQSAFARRFWEEAAGTGRLGYVFGTPVRSVVNERDAVRVTARDGREFAAKRLVCTIPLNVLSSVHFSPPLSPQRMAAANIGHVNQCVKVHAEVSCKDMRSWSGISYPFNKLAYAIGDGTTPAGNTHIVCLGGAHNHIQPEEDVEATKMAVENMSPGNMDIKRLVFHNWCKDEFAKGAWFFAPPQLLSKSLDELRARHGNVLFANSDWALGWRGFIDGAIEEGTRAAVTVIEELRPAPAVRSHL

SEQ ID NO: 893 - DNA, 1485 bp, synthetic construct
  misc_feature 1..1485: note = Variant of monoamine oxidase
  source 1..1485: mol_type = other DNA
atgaccagccgcgacggctatcagtggaccccggaaacgggtctgacccagggcgtaccgtccctgggtgtcatttcgccgccgactaacatcgaagataccgataaggacgggccttgggatgtcattgtcattgggggcgggtattgtgggctgaccgcaacccgtgatttaaccgtcgcagggttcaagacgctgctgctggaggcccgtgatcgtattggtggccgctcctggagcagtaatattgacggttacccgtatgagatgggtggcacctgggttcattggcatcaatctcacgtgtggcgtgaaatcacgcgttataaaatgcacaacgcgctgtctccatcatttaacttttcacgtggcgtgaatcacttccaactgcgtaccaatccgaccaccagtacgtacatgacgcacgaagcggaggatgaactgctgcgtagcgcattgcataaattcaccaatgtcgacggcactaatggccgtacagtgttgccgttcccacatgatatgttttatgtgccggaatttcgcaagtatgatgaaatgtcatattccgaacgcattgaccagatccgcgacgaactgtctttgaacgaacgctctagtttagaggctttcattttattatgtagcggtggcaccctggaaaactccagctttggtgaatttctgcattggtgggcaatgtcgggttacacgtatcagggctgtatggattgtttaatctcctataaatttaaggatggccagagtgcgttcgcgcgtcgcttctgggaagaagccgctggcactggccgtctgggctatgtctttggttgtccggtgcgttctgtggtggatgaacgcgacgcagtacgtgttaccgcacgtgacggtcgcgaattcgcagcgaaacgtttggtttgcacgattccgctgaacgtattgagttctgttcattttagcccaccactgtccccgcaacgcatggccgctgcgaacatcggccatgttaaccagtgcgtcaaagtgcatgcggaagtcagttgtccggatatgcgttcatggtcgggtatctcctatccgttcaacaaattagcctacgctatcggcgatggcacgaccccagcgggtaatacgcatattgtgtgccttgggggggcccataatcatatccagccggaagaggacgtggaagcaacgaagatggccgttgaaaacatgtcgcctgggaatatggatatcaaacgtctggtcttccacaactggtgcaaggatgaatttgccaaaggcgcgtggttcttcgcccctccacagctgctgtcaaagagcctggatgaactgcgctgccgtcacggtaatgtcctgtttgcaaactccgattgggccttaggttggcgtggttttatcgatggtgctatcgaggagggcacccgcgcagcggttactgtaattgaggaactgcgtcctgcgcctgcggtgcgttcccacctg

SEQ ID NO: 894 - protein, 495 aa, synthetic construct; identical to SEQ ID NO: 372
  REGION 1..495: note = Variant of monoamine oxidase

SEQ ID NO: 895 - DNA, 1485 bp, synthetic construct
  misc_feature 1..1485: note = Variant of monoamine oxidase
  source 1..1485: mol_type = other DNA
atgaccagccgcgacggctatcagtggaccccggaaacgggtctgacccagggcgtaccgtccctgggtgtcatttcgccgccgactaacatcgaagataccgataaggacgggccttgggatgtcattgtcattgggggcgggtattgtgggctgaccgcaacccgtgatttaaccgtcgcagggttcaagacgctgctgctggaggcccgtgatcgtattggtggccgctcctggagcagttttattgacggttacctgtatgagatgggtggcacttgggttcattggcatcaatctcacgtgtggcgtgaaatcacgcgttataaaatgcacggcgcgctgtctaaatcatttaacttttcacgtggcgtgaatcacttccaactgcgtaccaatccgaccaccagtacgtacatgacgcacgaagcggaggatgaactgctgcgtagcgcattgcataaattcaccaatgtcgacggcactaatggccgtacagtgttgccgttcccacatgatatgttttatgtgccggaatttcgcaagtatgacgaaatgtcatattccgaacgcattgaccagatccgcgacgaactgtctttgaacgaacgctctagtttagaggctttcattttattatgtagcggtggcaccctggaaaactccagctttggtgaatttctgcattggtgggcaatgtcgggttacacgtatcagggctgtatggattgtttaatctcctataaatttaaggatggccagagtgcgttcgcgcgtcgcttctgggaagaagccgctggcactggccgtctgggctatgtctttggttgtccggtgcgttctgtggtgaacgaacgcgacgcagtacgtgttaccgcacgtgacggtcgcgaattcgcagcgaaacgtttggtttgcacgattccgctgaacgtattgagttctgttcattttagcccaccactgtccccgcaacgcatggccgctgcgaacattggccatgttaaccagggcgtcaaagtgcatgcggaagtcagttgtccggatatgcgttcatggtcgggtatctcctatccgttcaacaaattagcctacgctatcggcgatggcacgaccccagcgggtaatacgcatattgtgtgccttgggggggcccataatcatatccagccggaagaggacgtggaagcaacgaagatggccgttgaaaacatgtcgcctgggaatatggatatcaaacgtctggtcttcgggaactggtgcaaggatgaatttgccaaaggcgcgtggttcttcgcccctccacagctgctgtcaaagagcctggatgaactgcgctgccgtcacggtaatgtcctgtttgcaaactccgattgggccttaggttggcgtggttttatcgatggtgctatcgaggagggcacccgcgcagcggttactgtaattgaggaactgcgtcctgcgcctgcggtgcgttcccacctg

SEQ ID NO: 896 - protein, 495 aa, synthetic construct
  REGION 1..495: note = Variant of monoamine oxidase
MTSRDGYQWTPETGLTQGVPSLGVISPPTNIEDTDKDGPWDVIVIGGGYCGLTATRDLTVAGFKTLLLEARDRIGGRSWSSFIDGYLYEMGGTWVHWHQSHVWREITRYKMHGALSKSFNFSRGVNHFQLRTNPTTSTYMTHEAEDELLRSALHKFTNVDGTNGRTVLPFPHDMFYVPEFRKYDEMSYSERIDQIRDELSLNERSSLEAFILLCSGGTLENSSFGEFLHWWAMSGYTYQGCMDCLISYKFKDGQSAFARRFWEEAAGTGRLGYVFGCPVRSVVNERDAVRVTARDGREFAAKRLVCTIPLNVLSSVHFSPPLSPQRMAAANIGHVNQGVKVHAEVSCPDMRSWSGISYPFNKLAYAIGDGTTPAGNTHIVCLGGAHNHIQPEEDVEATKMAVENMSPGNMDIKRLVFGNWCKDEFAKGAWFFAPPQLLSKSLDELRCRHGNVLFANSDWALGWRGFIDGAIEEGTRAAVTVIEELRPAPAVRSHL

SEQ ID NO: 897 - DNA, 1485 bp, synthetic construct
  misc_feature 1..1485: note = Variant of monoamine oxidase
  source 1..1485: mol_type = other DNA
atgaccagccgcgacggctatcagtggaccccggaaacgggtctgacccagggcgtaccgtccctgggtgtcatttcgccgccgactaacatcgaagataccgataaggacgggccttgggatgtcattgtcattgggggcgggtattgtgggctgaccgcaacccgtgatttaaccgtcgcagggttcaagacgctgctgctggaggcccgtgatcgtattggtggccgctcctggagcagtaatattgacggttacccgtatgagatgggtggcacttgggttcattggcatcaatcgcacgtgtggcgtgaaatcacgcgttataaaatgcacaacgcgctgtctccatcatttaacttttcacgtggcgtgaatcacttccaactgcgtaccaatccgaccaccagtacgtacatgacgcacgaagcggaggatgaactgctgcgtagcgcattgcataaattcaccaatgtcgacggcactaatggccgtacagtgttgccgttcccacatgatatgttttatgtgccggaatttcgcaagtatgacgaaatgtcatattccgaacgcattgaccagatccgcgacgatctgtctttgaacgaacgctctagtttagaggctttcattttattatgtagcggtggcaccctggaaaactccagctttggtgaatttctgcattggtgggcaatgtcgggttacacgtatcagggctgtatggattgtttaatttcctataaatttaaggatggccagagtgcgttcgcgcgtcgcttctgggaagaagccgctggcactggccgtctgggctatgtctttggtactccggtgcgttctgtggtgaacgaacgcgacgcagtacgtgttaccgcacgtgacggtcgcgaattcgcagcgaaacgtttggtttgcacgattccgctgaacgtattgagttctgttcattttagcccaccactgtccccgcaacgcatggccgctgcgaacattggccatgttaaccagtgcgtcaaagtgcatgcggaagtcagttgcaaggatatgcgttcatggtcgggtatctcctatccgttcaacaaattagcctacgctatcggcgatggcacgaccccagcgggtaatacgcatattgtgtgccttgggggggcccataatcatatccagccggaagaggacgtggaagcaacgaagatggccgttgaaaacatgtcgcctgggaatatggatatcaaacgtctggtcttccacaactggtgcaaggatgaatttgccaaaggcgcgtggttcttcgcccctccacagctgctgtcaaagagcctggatgaactgcgcgcacgtcacggtaatgtcctgtttgcaaactccgattgggccttaggttggcgtggttttatcgatggtgctatcgaggagggcacccgcgcagcggttactgtaattgaggaactgcgtcctgcgcctgcggtgcgttcccacctg

SEQ ID NO: 898 - protein, 495 aa, synthetic construct
  REGION 1..495: note = Variant of monoamine oxidase
MTSRDGYQWTPETGLTQGVPSLGVISPPTNIEDTDKDGPWDVIVIGGGYCGLTATRDLTVAGFKTLLLEARDRIGGRSWSSNIDGYPYEMGGTWVHWHQSHVWREITRYKMHNALSPSFNFSRGVNHFQLRTNPTTSTYMTHEAEDELLRSALHKFTNVDGTNGRTVLPFPHDMFYVPEFRKYDEMSYSERIDQIRDDLSLNERSSLEAFILLCSGGTLENSSFGEFLHWWAMSGYTYQGCMDCLISYKFKDGQSAFARRFWEEAAGTGRLGYVFGTPVRSVVNERDAVRVTARDGREFAAKRLVCTIPLNVLSSVHFSPPLSPQRMAAANIGHVNQCVKVHAEVSCKDMRSWSGISYPFNKLAYAIGDGTTPAGNTHIVCLGGAHNHIQPEEDVEATKMAVENMSPGNMDIKRLVFHNWCKDEFAKGAWFFAPPQLLSKSLDELRARHGNVLFANSDWALGWRGFIDGAIEEGTRAAVTVIEELRPAPAVRSHL

SEQ ID NO: 899 - DNA, 1485 bp, synthetic construct
  misc_feature 1..1485: note = Variant of monoamine oxidase
  source 1..1485: mol_type = other DNA
atgaccagccgcgacggctatcagtggaccccggaaacgggtctgacccagggcgtaccgtccctgggtgtcatttcgccgccgactaacatcgaagataccgataaggacgggccttgggatgtcattgtcattgggggcgggtattgtgggctgaccgcaacccgtgatttaaccgtcgcagggttcaagacgctgctgctggaggcccgtgatcgtattggtggccgctcctggagcagtaatattgacggttacccgtatgagatgggtggcacttgggttcattggcatcaatctcacgtgtggcgtgaaatcacgcgttataaaatgcacaacgcgctgtctccatcatttaacttttcacgtggcgtgaatcacttccaactgcgtaccaatccgaccaccagtacgtacatgacgcacgaagcggaggatgaactgctgcgtagcgcattgcataaattcaccaatgtcgacggcactaatggccgtacagtgttgccgttcccacatgatatgttttatgtgccggaatttcgcaagtatgacgaaatgtcatattccgaacgcattgaccagatccgcgacgaactgtctttgaacgaacgctctagtttagaggctttcattttattatgtagcggtggcaccctggaaaactccagctttggtgaatttctgcattggtgggcaatgtcgggttacacgtatcagggctgtatggattgtttaatctcctataaatttaaggatggccagagtgcgttcgcgcgtcgcttctgggaagaagccgctggcactggccgtctgggctatgtctttggttgtccggtgcgttctgtggtggatgaacgcgacgcagtacgtgttaccgcacgtgacggtcgcgaattcgcagcgaaacgtttggtttgcacgattccgctgaacgtattgagttctgttcattttagcccaccactgtccccgcaacgcatggccgctgcgaacattggccatgttaaccagtgcgtcaaagtgcatgcggaagtcagttgtccggatatgcgttcatggtcgggtatctcctatccgttcaacaaattagcctacgctatcggcgatggcacgaccccagcgggtaatacgcatattgtgtgccttgggggggccgagaatcatatccagccggaagaggacgtggaagcaacgaagatggccgttgaaaacatgtcgcctgggaatatggatatcaaacgtctggtcttccacaactggtgcaaggatgaatttgccaaaggcgcgtggttcttcgcccctccacagctgctgtcaaagagcctggatgaactgcgctgccgtcacggtaatgtcctgtttgcaaactccgattgggccttaggttggcgtggttttatcgatggtgctatcgaggagggcacccgcgcagcggttactgtaattgaggaactgcgtcctgcgcctgcggtgcgttcccacctg

SEQ ID NO: 900 - protein, 495 aa, synthetic construct
  REGION 1..495: note = Variant of monoamine oxidase
MTSRDGYQWTPETGLTQGVPSLGVISPPTNIEDTDKDGPWDVIVIGGGYCGLTATRDLTVAGFKTLLLEARDRIGGRSWSSNIDGYPYEMGGTWVHWHQSHVWREITRYKMHNALSPSFNFSRGVNHFQLRTNPTTSTYMTHEAEDELLRSALHKFTNVDGTNGRTVLPFPHDMFYVPEFRKYDEMSYSERIDQIRDELSLNERSSLEAFILLCSGGTLENSSFGEFLHWWAMSGYTYQGCMDCLISYKFKDGQSAFARRFWEEAAGTGRLGYVFGCPVRSVVDERDAVRVTARDGREFAAKRLVCTIPLNVLSSVHFSPPLSPQRMAAANIGHVNQCVKVHAEVSCPDMRSWSGISYPFNKLAYAIGDGTTPAGNTHIVCLGGAENHIQPEEDVEATKMAVENMSPGNMDIKRLVFHNWCKDEFAKGAWFFAPPQLLSKSLDELRCRHGNVLFANSDWALGWRGFIDGAIEEGTRAAVTVIEELRPAPAVRSHL

SEQ ID NO: 901 - DNA, 1485 bp, synthetic construct
  misc_feature 1..1485: note = Variant of monoamine oxidase
  source 1..1485: mol_type = other DNA
atgaccagccgcgacggctatcagtggaccccggaaacgggtctgacccagggcgtaccgtccctgggtgtcatttcgccgccgactaacatcgaagataccgataaggacgggccttgggatgtcattgtcattgggggcgggtattgtgggctgaccgcaacccgtgatttaaccgtcgcagggttcaagacgctgctgctggaggcccgtgatcgtattggtggccgctcctggagcagtaatattgacggttacccgtatgagatgggtggcacttgggttcattggcatcaatctcacgtgtggcgtgaaatcacgcgttataaaatgcacaacgcgctgtctccatcatttaacttttcacgtggcgtgaatcacttccaactgcgtaccaatccgaccaccagtacgtacatgacgcacgaagcggaggatgaactgctgcgtagcgcattgcataaattcaccaatgtcgacggcactaatggccgtacagtgttgccgttcccacatgatatgttttatgtgccggaatttcgcaagtatgacgaaatgtcatattccgaacgcattgaccagatccgcgacgaactgtctttgaacgaacgctctagtttagaggctttcattttattatgtagcggtggcaccctggaaaactccagctttggtgaatttctgcattggtgggcaatgtcgggttacacgtatcagggctgtatggattgtttaatgtcctataaatttaaggatggccagagtgcgttcgcgcgtcgcttctgggaagaagccgctggcactggccgtctgggctatgtctttggttgtccggtgcgttctgtggtgaacgaacgcgacgcagtacgtgttaccgcacgtgacggtcgcgaattcgcagcgaaacgtttggtttgcacgattccgctgaacgtattgagttctgttcattttagcccaccactgtccccgcaacgcatggccgctgcgaacattggccatgttaaccagtgcgtcaaagtgcatgcggaagtcagttgtccggatatgcgttcatggtcgggtatctcctatccgttcaacaaattagcctacgctatcggcgatggcacgaccccagcgggtaatacgcatattgtgtgccttgggggggcccataatcatatccagccggaagaggacgtggaagcaacgaagatggccgttgaaaacatgtcgcctgggaatatggatatcaaacgtctggtcttccacaactggtgcaaggatgaatttgccaaaggcgcgtggttcttcgcccctccacagctgctgtcaaagagcctggatgaacgtcgcgcacgtcacggtaatgtcctgtttgcaaactccgattgggccttaggttggcgtggttttatcgatggtgctatcgaggagggcacccgcgcagcggttactgtaattgaggaactgcgtcctgcgcctgcggtgcgttcccacctg

SEQ ID NO: 902 - protein, 495 aa, synthetic construct
  REGION 1..495: note = Variant of monoamine oxidase
MTSRDGYQWTPETGLTQGVPSLGVISPPTNIEDTDKDGPWDVIVIGGGYCGLTATRDLTVAGFKTLLLEARDRIGGRSWSSNIDGYPYEMGGTWVHWHQSHVWREITRYKMHNALSPSFNFSRGVNHFQLRTNPTTSTYMTHEAEDELLRSALHKFTNVDGTNGRTVLPFPHDMFYVPEFRKYDEMSYSERIDQIRDELSLNERSSLEAFILLCSGGTLENSSFGEFLHWWAMSGYTYQGCMDCLMSYKFKDGQSAFARRFWEEAAGTGRLGYVFGCPVRSVVNERDAVRVTARDGREFAAKRLVCTIPLNVLSSVHFSPPLSPQRMAAANIGHVNQCVKVHAEVSCPDMRSWSGISYPFNKLAYAIGDGTTPAGNTHIVCLGGAHNHIQPEEDVEATKMAVENMSPGNMDIKRLVFHNWCKDEFAKGAWFFAPPQLLSKSLDERRARHGNVLFANSDWALGWRGFIDGAIEEGTRAAVTVIEELRPAPAVRSHL

SEQ ID NO: 903 - DNA, 1485 bp, synthetic construct
  misc_feature 1..1485: note = Variant of monoamine oxidase
  source 1..1485: mol_type = other DNA
atgaccagccgcgacggctatcagtggaccccggaaacgggtctgacccagggcgtaccgtccctgggtgtcatttcgccgccgactaacatcgaagataccgataaggacgggccttgggatgtcattgtcattgggggcgggtattgtgggctgaccgcaacccgtgatttaaccgtcgcagggttcaagacgctgctgctggaggcccgtgatcgtattggtggccgctcctggagcagtaatattgacggttacccgtatgagatgggtggcacctgggttcattggcatcaatctcacgtgtggcgtgaaatcacgcgttataaaatgcacaacgcgctgtctccatcatttaacttttcacgtggcgtgaatcacttccaactgcgtaccaatccgaccaccagtacgtacatgacgcacgaagcggaggatgaactgctgcgtagcgcattgcataaattcaccaatgtcgacggcactaatggccgtacagtgttgccgttcccacatgatatgttttatgtgccggaatttcgcaagtatcgcgaaatgtcatattccgaacgcattgaccagatccgcgacgaactgtctttgaacgaacgctctagtttagaggctttcattttattatgtagcggtggcaccctggaaaactccagctttggtgaatttctgcattggtgggcaatgtcgggttacacgtatcagggctgtatggattgtttaatctcctataaatttaaggatggccagagtgcgttcgcgcgtcgcttctgggaagaagccgctggcactggccgtctgggctatgtctttggttgtccggtgcgttctgtggtgaacgaacgcgacgcagtacgtgttaccgcacgtgacggtcgcgaattcgcagcgaaacgtttggtttgcacgattccgctgaacgtattgagttctgttcattttagcccaccactgtccccgcaacgcatggccgctgcgaacattggccatgttaaccagtgcgtcaaagtgcatgcggaagtcagttgtccggatatgcgttcatggtcgggtatctcctatccgttcaacaaattagcctacgctatcggcgatggcacgaccccagcgggtaatacgcatattgtgtgccttgggggggccgagaatcatatccagccggaagaggacgtggaagcaacgaagatggccgttgaaaacatgtcgcctgggaatatggatatcaaacgtctggtcttccacaactggtgcaaggatgaatttgccaaaggcgcgtggttcttcgcccctccacagctgctgtcaaagagcctggatgaactgcgctgccgtcacggtaatgtcctgtttgcaaactccgattgggccttaggttggcgtggttttatcgatggtgctatcgaggagggcacccgcgcagcggttactgtaattgaggaactgcgtcctgcgcctgcggtgcgttcccacctg

SEQ ID NO: 904 - protein, 495 aa, synthetic construct
  REGION 1..495: note = Variant of monoamine oxidase
MTSRDGYQWTPETGLTQGVPSLGVISPPTNIEDTDKDGPWDVIVIGGGYCGLTATRDLTVAGFKTLLLEARDRIGGRSWSSNIDGYPYEMGGTWVHWHQSHVWREITRYKMHNALSPSFNFSRGVNHFQLRTNPTTSTYMTHEAEDELLRSALHKFTNVDGTNGRTVLPFPHDMFYVPEFRKYREMSYSERIDQIRDELSLNERSSLEAFILLCSGGTLENSSFGEFLHWWAMSGYTYQGCMDCLISYKFKDGQSAFARRFWEEAAGTGRLGYVFGCPVRSVVNERDAVRVTARDGREFAAKRLVCTIPLNVLSSVHFSPPLSPQRMAAANIGHVNQCVKVHAEVSCPDMRSWSGISYPFNKLAYAIGDGTTPAGNTHIVCLGGAENHIQPEEDVEATKMAVENMSPGNMDIKRLVFHNWCKDEFAKGAWFFAPPQLLSKSLDELRCRHGNVLFANSDWALGWRGFIDGAIEEGTRAAVTVIEELRPAPAVRSHL

SEQ ID NO: 905 - DNA, 1485 bp, synthetic construct
  misc_feature 1..1485: note = Variant of monoamine oxidase
  source 1..1485: mol_type = other DNA
atgaccagccgcgacggctatcagtggaccccggaaacgggtctgacccagggcgtaccgtccctgggtgtcatttcgccgccgactaacatcgaagataccgataaggacgggccttgggatgtcattgtcattgggggcgggtattgtgggctgaccgcaacccgtgatttaaccgtcgcagggttcaagacgctgctgctggaggcccgtgatcgtattggtggccgctcctggagcagtaatattgacggttacccgtatgagatgggtggcacttgggttcattggcatcaatctcacgtgtggcgtgaaatcacgcgttataaaatgcacaacgcgctgtctccatcatttaacttttcacgtggcgtgaatcacttccaactgcgtaccaatccgaccaccagtacgtacatgacgcacgaagcgtcggctgaactgatgcgtagcgcattgcataaattcaccaatgtcgacggcactaatggccgtacagtgttgccgttcccacatgatatgttttatgtgccggaatttcgcaagtatgacgaaatgtcatattccgaacgcattgaccagatccgcgacgatctgtctttgaacgaacgctctagtttagaggctttcattttattatgtagcggtggcaccctggaaaactccagctttggtgaatttctgcattggtgggcaatgtcgggttacacgtatcagggctgtattgattgtttaatttcctataaatttaagggtggccagagtgcgttcgcgcgtcgcttctgggaagaagccgctggcactggccgtctgggctatgtctttggtactccggtgcgttctgtggtgaacgaacgcgacgcagtacgtgttaccgcacgtgacggtcgcgaattcgcagcgaaacgtttggtttgcacgattccgctgaacgtattgagttctgttcattttagcccaccactgtccccgcaacgcatggccgctgcgaacattggccatgttaaccagtgcgtcaaagtgcatgcggaagtcagtaacccagatatgcgttcatggtcgggtatctcctatccgttcaacaaattagcctacgctatcggcgatggcacgaccccagcgggtaatacgcatattgtgtgccttgggggggcccataatcatatccagccggaagaggacgtggaagcaacgaagatggccgttgaaaacatgtcgcctgggaatatggatatcaaacgtctggtcttccacaactggtgcaaggatgaatttgccaaaggcgcgtggttcttcgcccctccacagctgctgtcaaagagcctggatgaactgcgctgtcgtcacggtaatgtcctgtttgcaaactccgattgggccttaggttggcgtggttttatcgatggtgctatcgaggagggcacccgcgcagcggttactgtaattgaggaactgcgtcctgcgcctgcggtgcgttcccacctg

SEQ ID NO: 906 - protein, 495 aa, synthetic construct
  REGION 1..495: note = Variant of monoamine oxidase
MTSRDGYQWTPETGLTQGVPSLGVISPPTNIEDTDKDGPWDVIVIGGGYCGLTATRDLTVAGFKTLLLEARDRIGGRSWSSNIDGYPYEMGGTWVHWHQSHVWREITRYKMHNALSPSFNFSRGVNHFQLRTNPTTSTYMTHEASAELMRSALHKFTNVDGTNGRTVLPFPHDMFYVPEFRKYDEMSYSERIDQIRDDLSLNERSSLEAFILLCSGGTLENSSFGEFLHWWAMSGYTYQGCIDCLISYKFKGGQSAFARRFWEEAAGTGRLGYVFGTPVRSVVNERDAVRVTARDGREFAAKRLVCTIPLNVLSSVHFSPPLSPQRMAAANIGHVNQCVKVHAEVSNPDMRSWSGISYPFNKLAYAIGDGTTPAGNTHIVCLGGAHNHIQPEEDVEATKMAVENMSPGNMDIKRLVFHNWCKDEFAKGAWFFAPPQLLSKSLDELRCRHGNVLFANSDWALGWRGFIDGAIEEGTRAAVTVIEELRPAPAVRSHL

SEQ ID NO: 907 - DNA, 1485 bp, synthetic construct
  misc_feature 1..1485: note = Variant of monoamine oxidase
  source 1..1485: mol_type = other DNA
atgaccagccgcgacggctatcagtggaccccggaaacgggtctgacccagggcgtaccgtccctgggtgtcatttcgccgccgactaacatcgaagataccgataaggacgggccttgggatgtcattgtcattgggggcgggtattgtgggctgaccgcaacccgtgatttaaccgtcgcagggttcaagacgctgctgctggaggcccgtgatcgtattggtggccgctcctggagcagtaatattgacggttacccgtatgagatgggtggcacttgggttcattggcatcaatcgcacgtgtggcgtgaaatcacgcgttataaaatgcacaacgcgctgtctccatcatttaacttttcacgtggcgtgaatcacttccaactgcgtaccaatccgaccaccagtacgtacatgacgcacgaagcggaggatgaactgctgcgtagcgcattgcataaattcaccaatgtcgacggcactaatggccgtacagtgttgccgttcccacatgatatgttttatgtgccggaatttcgcaagtatgacgaaatgtcatattccgaacgcattgaccagatccgcgacgaactgtctttgaacgaacgctctagtttagaggctttcattttattatgtagcggtggcaccctggaaaactccagctttggtgaatttctgcattggtgggcaatgtcgggttacacgtatcagggctgtatggattgtttaatgtcctataaatttaaggatggccagagtgcgttcgcgcgtcgcttctgggaagaagccgctggcactggccgtctgggctatgtctttggtactccggtgcgttctgtggtgaacgaacgcgacgcagtacgtgttaccgcacgtgacggtcgcgaattcgcagcgaaacgtttggtttgcacgattccgctgaacgtattgagttctgttcattttagcccaccactgtccccgcaacgcatggccgctgcgaacattggccatgttaaccagtgcgtcaaagtgcatgcggaagtcagttgcaaggatatgcgttcatggtcgggtatctcctatccgttcaacaaattagcctacgctatcggcgatggcacgaccccagcgggtaatacgcatattgtgtgccttgggggggcccataatcatatccagccggaagaggacgtggaagcaacgaagatggccgttgaaaacatgtcgcctgggaatatggatatcaaacgtctggtcttccacaactggtgcaaggatgaatttgccaaaggcgcgtggttcttcgcccctccacagctgctgtcaaagagcctggatgaactgcgcgcacgtcacggtaatgtcctgtttgcaaactccgattgggccttaggttggcgtggttttatcgatggtgctatcgaggagggcacccgcgcagcggttactgtaattgaggaactgcgtcctgcgcctgcggtgcgttcccacctg

SEQ ID NO: 908 - protein, 495 aa, synthetic construct
  REGION 1..495: note = Variant of monoamine oxidase
MTSRDGYQWTPETGLTQGVPSLGVISPPTNIEDTDKDGPWDVIVIGGGYCGLTATRDLTVAGFKTLLLEARDRIGGRSWSSNIDGYPYEMGGTWVHWHQSHVWREITRYKMHNALSPSFNFSRGVNHFQLRTNPTTSTYMTHEAEDELLRSALHKFTNVDGTNGRTVLPFPHDMFYVPEFRKYDEMSYSERIDQIRDELSLNERSSLEAFILLCSGGTLENSSFGEFLHWWAMSGYTYQGCMDCLMSYKFKDGQSAFARRFWEEAAGTGRLGYVFGTPVRSVVNERDAVRVTARDGREFAAKRLVCTIPLNVLSSVHFSPPLSPQRMAAANIGHVNQCVKVHAEVSCKDMRSWSGISYPFNKLAYAIGDGTTPAGNTHIVCLGGAHNHIQPEEDVEATKMAVENMSPGNMDIKRLVFHNWCKDEFAKGAWFFAPPQLLSKSLDELRARHGNVLFANSDWALGWRGFIDGAIEEGTRAAVTVIEELRPAPAVRSHL

SEQ ID NO: 909 - DNA, 1485 bp, synthetic construct
  misc_feature 1..1485: note = Variant of monoamine oxidase
  source 1..1485: mol_type = other DNA
atgaccagccgcgacggctatcagtggaccccggaaacgggtctgacccagggcgtaccgtccctgggtgtcatttcgccgccgactaacatcgaagataccgataaggacgggccttgggatgtcattgtcattgggggcgggtattgtgggctgaccgcaacccgtgatttaaccgtcgcagggttcaagacgctgctgctggaggcccgtgatcgtattggtggccgctcctggagcagtaatattgacggttacccgtatgagatgggtggcacttgggttcattggcatcaaccgcacgtgtggcgtgaaatcacgcgttataaaatgcacaacgcgctgtctccatcatttaacttttcacgtggcgtgaatcacttccaactgcgtaccaatccgaccaccagtacgtacatgacgcacgaagcggaggatgaactgctgcgtagcgcattgcataaattcaccaatgtcgacggcactaatggccgtacagtgttgccgttcccacatgatatgttttatgtgccggaatttcgcaagtatgacgaaatgtcatattccgaacgcattgaccagatccgcgacgaactgtctttgaacgaacgctctagtttagaggctttcattttattatgtagcggtggcaccctggaaaactccagctttggtgaatttctgcattggtgggcaatgtcgggttacacgtatcagggctgtatggattgtttaatttcctataaatttaaggatggccagagtgcgttcgcgcgtcgcttctgggaagaagccgctggcactggccgtctgggctatgtctttggttgtccggtgcgttctgtggtgaacgaacgcgacgcagtacgtgttaccgcacgtgacggtcgcgaattcgcagcgaaacgtttggtttgcacgattccgctgaacgtattgagttctgttcattttagcccaccactgtccccgcaacgcatggccgctgcgaacattggccatgttaaccagtgcgtcaaagtgcatgcggaagtcagttgtccggatatgcgttcatggtcgggtatctcctatccgttcaacaaattagcctacgctatcggcgatggcacgaccccagcgggtaatacgcatattgtgtgccttgggggggcccataatcatatccagccggaagaggacgtggaagcaacgaagatggccgttgaaaacatgtcgcctgggaatatggatatcaaacgtctggtcttccacaactggtgcaaggatgaatttgccaaaggcgcgtggttcttcgcccctccacagctgctgtcaaagagcctggatgaacgtcgcgcacgtcacggtaatgtcctgtttgcaaactccgattgggccttaggttggcgtggttttatcgatggtgctatcgaggagggcacccgcgcagcggttactgtaattgaggaactgcgtcctgcgcctgcggtgcgttcccacctg

SEQ ID NO: 910 - protein, 495 aa, synthetic construct
  REGION 1..495: note = Variant of monoamine oxidase
MTSRDGYQWTPETGLTQGVPSLGVISPPTNIEDTDKDGPWDVIVIGGGYCGLTATRDLTVAGFKTLLLEARDRIGGRSWSSNIDGYPYEMGGTWVHWHQPHVWREITRYKMHNALSPSFNFSRGVNHFQLRTNPTTSTYMTHEAEDELLRSALHKFTNVDGTNGRTVLPFPHDMFYVPEFRKYDEMSYSERIDQIRDELSLNERSSLEAFILLCSGGTLENSSFGEFLHWWAMSGYTYQGCMDCLISYKFKDGQSAFARRFWEEAAGTGRLGYVFGCPVRSVVNERDAVRVTARDGREFAAKRLVCTIPLNVLSSVHFSPPLSPQRMAAANIGHVNQCVKVHAEVSCPDMRSWSGISYPFNKLAYAIGDGTTPAGNTHIVCLGGAHNHIQPEEDVEATKMAVENMSPGNMDIKRLVFHNWCKDEFAKGAWFFAPPQLLSKSLDERRARHGNVLFANSDWALGWRGFIDGAIEEGTRAAVTVIEELRPAPAVRSHL

SEQ ID NO: 911 - DNA, 1485 bp, synthetic construct
  misc_feature 1..1485: note = Variant of monoamine oxidase
  source 1..1485: mol_type = other DNA
atgaccagccgcgacggctatcagtggaccccggaaacgggtctgacccagggcgtaccgtccctgggtgtcatttcgccgccgactaacatcgaagataccgataaggacgggccttgggatgtcattgtcattgggggcgggtattgtgggctgaccgcaacccgtgatttaaccgtcgcagggttcaagacgctgctgctggaggcccgtgatcgtattggtggccgctcctggagcagtaatattgacggttacccgtatgagatgggtggcacttgggttcattggcatcaaccgcacgtgtggcgtgaaatcacgcgttataaaatgcacaacgcgctgtctccatcatttaacttttcacgtggcgtgaatcacttccaactgcgtaccaatccgaccaccagtacgtacatgacgcacgaagcgggggatgaactgctgcgtagcgcattgcataaattcaccaatgtcgacggcactaatggccgtacagtgttgccgttcccacatgatatgttttatgtgccggaatttcgcaagtatgacgaaatgtcatattccgaacgcattgaccagatccgcgacgatctgtctttgaacgaacgctctagtttagaggctttcattttattatgtagcggtggcaccctggaaaactccagctttggtgaatttctgcattggtgggcaatgtcgggttacacgtatcagggctgtattgattgtttaatgtcctataaatttaaggatggccagagtgcgttcgcgcgtcgcttctgggaagaagccgctggcactggccgtctgggctatgtctttggttgcccggtgcgttctgtggtgaacgaacgcgacgcagtacgtgttaccgcacgtgacggtcgcgaattcgcagcgaaacgtttggtttgcacgattccgctgaacgtattgagttctgttcattttagcccaccactgtccccgcaacgcatggccgctgcgaacattggccatgttaaccagtgcgtcaaagtgcatgcggaagtcagttgcaaggatatgcgttcatggtcgggtatctcctatccgttcaacaaattagcctacgctatcggcgatggcacgaccccagcgggtaatacgcatattgtgtgccttgggggggcccataatcatatccagccggaagaggacgtggaagcaacgaagatggccgttgaaaacatgtcgcctgggaatatggatatcaaacgtctggtcttccacaactggtgcaaggatgaatttgccaaaggcgcgtggttcttcgcccctccacagctgctgtcaaagagcctggatgaactgcgctgtcgtcacggtaatgtcctgtttgcaaactccgattgggccttaggttggcgtggttttatcgatggtgctatcgaggagggcacccgcgcagcggttactgtaattgaggaactgcgtcctgcgcctgcggtgcgttcccacctg

SEQ ID NO: 912 - protein, 495 aa, synthetic construct
  REGION 1..495: note = Variant of monoamine oxidase
MTSRDGYQWTPETGLTQGVPSLGVISPPTNIEDTDKDGPWDVIVIGGGYCGLTATRDLTVAGFKTLLLEARDRIGGRSWSSNIDGYPYEMGGTWVHWHQPHVWREITRYKMHNALSPSFNFSRGVNHFQLRTNPTTSTYMTHEAGDELLRSALHKFTNVDGTNGRTVLPFPHDMFYVPEFRKYDEMSYSERIDQIRDDLSLNERSSLEAFILLCSGGTLENSSFGEFLHWWAMSGYTYQGCIDCLMSYKFKDGQSAFARRFWEEAAGTGRLGYVFGCPVRSVVNERDAVRVTARDGREFAAKRLVCTIPLNVLSSVHFSPPLSPQRMAAANIGHVNQCVKVHAEVSCKDMRSWSGISYPFNKLAYAIGDGTTPAGNTHIVCLGGAHNHIQPEEDVEATKMAVENMSPGNMDIKRLVFHNWCKDEFAKGAWFFAPPQLLSKSLDELRCRHGNVLFANSDWALGWRGFIDGAIEEGTRAAVTVIEELRPAPAVRSHL

SEQ ID NO: 913 - DNA, 1485 bp, synthetic construct
  misc_feature 1..1485: note = Variant of monoamine oxidase
  source 1..1485: mol_type = other DNA
atgaccagccgcgacggctatcagtggaccccggaaacgggtctgacccagggcgtaccgtccctgggtgtcatttcgccgccgactaacatcgaagataccgataaggacgggccttgggatgtcattgtcattgggggcgggtattgtgggctgaccgcaacccgtgatttaaccgtcgcagggttcaagacgctgctgctggaggcccgtgatcgtattggtggccgctcctggagcagtaatattgacggttacccgtatgagatgggtggcacttgggttcattggcatcaatcgcacgtgtggcgtgaaatcacgcgttataaaatgcacaacgcgctgtctccatcatttaacttttcacgtggcgtgaatcacttccaactgcgtaccaatccgaccaccagtacgtacatgacgcacgaagcgtcggatgaactgatgcgtagcgcattgcataaattcaccaatgtcgacggcactaatggccgtacagtgttgccgttcccacatgatatgttttatgtgccggaatttcgcaagtatgacgaaatgtcatattccgaacgcattgaccagatccgcgacgatctgtctttgaacgaacgctctagtttagaggctttcattttattatgtagcggtggcaccctggaaaactccagctttggtgaatttctgcattggtgggcaatgtcgggttacacgtatcagggctgtattgattgtttaatgtcctataaatttaaggatggccagagtgcgttcgcgcgtcgcttctgggaagaagccgctggcactggccgtctgggctatgtctttggtactccggtgcgttctgtggtgaacgaacgcgacgcagtacgtgttaccgcacgtgacggtcgcgaattcgcagcgaaacgtttggtttgcacgattccgctgaacgtattgagttctgttcattttagcccaccactgtccccgcaacgcatggccgctgcgaacattggccatgttaaccagtgcgtcaaagtgcatgcggaagtcagtaacccagatatgcgttcatggtcgggtatctcctatccgttcaacaaattagcctacgctatcggcgatggcacgaccccagcgggtaatacgcatattgtgtgccttgggggggcccataatcatatccagccggaagaggacgtggaagcaacgaagatggccgttgaaaacatgtcgcctgggaatatggatatcaaacgtctggtcttccacaactggtgcaaggatgaatttgccaaaggcgcgtggttcttcgcccctccacagctgctgtcaaagagcctggatgaactgcgcgcacgtcacggtaatgtcctgtttgcaaactccgattgggccttaggttggcgtggttttatcgatggtgctatcgaggagggcacccgcgcagcggttactgtaattgaggaactgcgtcctgcgcctgcggtgcgttcccacctg

SEQ ID NO: 914 - protein, 495 aa, synthetic construct
  REGION 1..495: note = Variant of monoamine oxidase
MTSRDGYQWTPETGLTQGVPSLGVISPPTNIEDTDKDGPWDVIVIGGGYCGLTATRDLTVAGFKTLLLEARDRIGGRSWSSNIDGYPYEMGGTWVHWHQSHVWREITRYKMHNALSPSFNFSRGVNHFQLRTNPTTSTYMTHEASDELMRSALHKFTNVDGTNGRTVLPFPHDMFYVPEFRKYDEMSYSERIDQIRDDLSLNERSSLEAFILLCSGGTLENSSFGEFLHWWAMSGYTYQGCIDCLMSYKFKDGQSAFARRFWEEAAGTGRLGYVFGTPVRSVVNERDAVRVTARDGREFAAKRLVCTIPLNVLSSVHFSPPLSPQRMAAANIGHVNQCVKVHAEVSNPDMRSWSGISYPFNKLAYAIGDGTTPAGNTHIVCLGGAHNHIQPEEDVEATKMAVENMSPGNMDIKRLVFHNWCKDEFAKGAWFFAPPQLLSKSLDELRARHGNVLFANSDWALGWRGFIDGAIEEGTRAAVTVIEELRPAPAVRSHL

SEQ ID NO: 915 - DNA, 1485 bp, synthetic construct
  misc_feature 1..1485: note = Variant of monoamine oxidase
  source 1..1485: mol_type = other DNA
atgaccagccgcgacggctatcagtggaccccggaaacgggtctgacccagggcgtaccgtccctgggtgtcatttcgccgccgactaacatcgaagataccgataaggacgggccttgggatgtcattgtcattgggggcgggtattgtgggctgaccgcaacccgtgatttaaccgtcgcagggttcaagacgctgctgctggaggcccgtgatcgtattggtggccgctcctggagcagtaatattgacggttacccgtatgagatgggtggcacttgggttcattggcatcaaccgcacgtgtggcgtgaaatcacgcgttataaaatgcacaacgcgctgtctccatcatttaacttttcacgtggcgtgaatcacttccaactgcgtaccaatccgaccaccagtacgtacatgacgcacgaagcggaggatgaactgctgcgtagcgcattgcataaattcaccaatgtcgacggcactaatggccgtacagtgttgccgttcccacatgatatgttttatgtgccggaatttcgcaagtatgacgaaatgtcatattccgaacgcattgaccagatccgcgacgaactgtctttgaacgaacgctctagtttagaggctttcattttattatgtagcggtggcaccctggaaaactccagctttggtgaatttctgcattggtgggcaatgtcgggttacacgtatcagggctgtatggattgtttaatttcctataaatttaaggatggccagagtgcgttcgcgcgtcgcttctgggaagaagccgctggcactggccgtctgggctatgtctttggtactccggtgcgttctgtggtgaacgaacgcgacgcagtacgtgttaccgcacgtgacggtcgcgaattcgcagcgaaacgtttggtttgcacgattccgctgaacgtattgagttctgttcattttagcccaccactgtccccgcaacgcatggccgctgcgaacattggccatgttaaccagtgcgtcaaagtgcatgcggaagtcagttgcaaggatatgcgttcatggtcgggtatctcctatccgttcaacaaattagcctacgctatcggcgatggcacgaccccagcgggtaatacgcatattgtgtgccttgggggggcccataatcatatccagccggaagaggacgtggaagcaacgaagatggccgttgaaaacatgtcgcctgggaatatggatatcaaacgtctggtcttccacaactggtgcaaggatgaatttgccaaaggcgcgtggttcttcgcccctccacagctgctgtcaaagagcctggatgaactgcgcgcacgtcacggtaatgtcctgtttgcaaactccgattgggccttaggttggcgtggttttatcgatggtgctatcgaggagggcacccgcgcagcggttactgtaattgaggaactgcgtcctgcgcctgcggtgcgttcccacctg

SEQ ID NO: 916 - protein, 495 aa, synthetic construct
  REGION 1..495: note = Variant of monoamine oxidase
MTSRDGYQWTPETGLTQGVPSLGVISPPTNIEDTDKDGPWDVIVIGGGYCGLTATRDLTVAGFKTLLLEARDRIGGRSWSSNIDGYPYEMGGTWVHWHQPHVWREITRYKMHNALSPSFNFSRGVNHFQLRTNPTTSTYMTHEAEDELLRSALHKFTNVDGTNGRTVLPFPHDMFYVPEFRKYDEMSYSERIDQIRDELSLNERSSLEAFILLCSGGTLENSSFGEFLHWWAMSGYTYQGCMDCLISYKFKDGQSAFARRFWEEAAGTGRLGYVFGTPVRSVVNERDAVRVTARDGREFAAKRLVCTIPLNVLSSVHFSPPLSPQRMAAANIGHVNQCVKVHAEVSCKDMRSWSGISYPFNKLAYAIGDGTTPAGNTHIVCLGGAHNHIQPEEDVEATKMAVENMSPGNMDIKRLVFHNWCKDEFAKGAWFFAPPQLLSKSLDELRARHGNVLFANSDWALGWRGFIDGAIEEGTRAAVTVIEELRPAPAVRSHL

SEQ ID NO: 917 - DNA, 1485 bp, synthetic construct
  misc_feature 1..1485: note = Variant of monoamine oxidase
  source 1..1485: mol_type = other DNA
atgaccagccgcgacggctatcagtggaccccggaaacgggtctgacccagggcgtaccgtccctgggtgtcatttcgccgccgactaacatcgaagataccgataaggacgggccttgggatgtcattgtcattgggggcgggtattgtgggctgaccgcaacccgtgatttaaccgtcgcagggttcaagacgctgctgctggaggcccgtgatcgtattggtggccgctcctggagcagtaacattgacggttacctgtatgagatgggtggcacttgggttcattggcatcaatctcacgtgtggcgtgaaatcacgcgttataaaatgcacggcgcgctgtctccgtcatttaacttttcacgtggcgtgaatcacttccaactgcgtaccaatccgaccaccagtacgtacatgacgcacgaagcggaggatgaactgctgcgtagcgcattgcataaattcaccaatgtcgacggcactaatggccgtacagtgttgccgttcccacatgatatgttttatgtgccggaatttcgcaagtatgacgaaatgtcatattccgaacgcattgaccagatccgcgacgaactgtctttgaacgaacgctctagtttagaggctttcattttattatgtagcggtggcggctcggaaaactccagctttggtgaatttctgcattggtgggcaatgtcgggttacacgtatcagggctgtatggattgtttaatctcctataaatttaaggatggccagagtgcgttcgcgcgtagcttctgggaagaagccgctggcactggccgtctgggctatgtctttggttgtccggtgcgttctgtggtgaacgaacgcgacgcagtacgtgttaccgcacgtgacggtcgcgaattcgcagcgaaacgtttggtttgcacgattccgctgaacgtattgagttctgttcattttagcccaccactgtccccgcaacgcatggccgctgcgaacattggccatgttaaccaggctgtcaaagtgcatgcggaagtcagttgtccggatatgcgttcatggtcgggtatctcctatccgttcaacaaattagcctacgctatcggcgatggcacgaccccagcgggtaatacgcatattgtgtgccttgggggggcccataatcatatccagccggaagaggacgtggaagcaacgaagatggccgttgaaaacatgtcgcctgggaatatggatatcaaacgtctggtcttccacaactggtgcaaggatgaatttgccaaaggcgcgtggttcttcgcccctccacagctgctgtcaaagagcctggatgaactgcgctgccgtcacggtaatgtcctgtttgcaaactccgattgggccttaggttggcgtggttttatcgatggtgctatcgaggagggcacccgcgcagcggttactgtaattgaggaactgcgtcctgcgcctgcggtgcgttcccacctg

SEQ ID NO: 918 - protein, 495 aa, synthetic construct
  REGION 1..495: note = Variant of monoamine oxidase
MTSRDGYQWTPETGLTQGVPSLGVISPPTNIEDTDKDGPWDVIVIGGGYCGLTATRDLTVAGFKTLLLEARDRIGGRSWSSNIDGYLYEMGGTWVHWHQSHVWREITRYKMHGALSPSFNFSRGVNHFQLRTNPTTSTYMTHEAEDELLRSALHKFTNVDGTNGRTVLPFPHDMFYVPEFRKYDEMSYSERIDQIRDELSLNERSSLEAFILLCSGGGSENSSFGEFLHWWAMSGYTYQGCMDCLISYKFKDGQSAFARSFWEEAAGTGRLGYVFGCPVRSVVNERDAVRVTARDGREFAAKRLVCTIPLNVLSSVHFSPPLSPQRMAAANIGHVNQAVKVHAEVSCPDMRSWSGISYPFNKLAYAIGDGTTPAGNTHIVCLGGAHNHIQPEEDVEATKMAVENMSPGNMDIKRLVFHNWCKDEFAKGAWFFAPPQLLSKSLDELRCRHGNVLFANSDWALGWRGFIDGAIEEGTRAAVTVIEELRPAPAVRSHL

SEQ ID NO: 919 - DNA, 1485 bp, synthetic construct
  misc_feature 1..1485: note = Variant of monoamine oxidase
  source 1..1485: mol_type = other DNA
atgaccagccgcgacggctatcagtggaccccggaaacgggtctgacccagggcgtaccgtccctgggtgtcatttcgccgccgactaacatcgaagataccgataaggacgggccttgggatgtcattgtcattgggggcgggtattgtgggctgaccgcaacccgtgatttaaccgtcgcagggttcaagacgctgctgctggaggcccgtgatcgtattggtggccgctcctggagcagtaatattgacggttacccgtatgagatgggtggcacttgggttcattggcatcaatcgcacgtgtggcgtgaaatcacgcgttataaaatgcacaacgcgctgtctccatcatttaacttttcacgtggcgtgaatcacttccaactgcgtaccaatccgaccaccagtacgtacatgacgcacgaagcggaggatgaactgctgcgtagcgcattgcataaattcaccaatgtcgacggcactaatggccgtacagtgttgccgttcccacatgatatgttttatgtgccggaatttcgcaagtatgacgaaatgtcatattccgaacgcattgaccagatccgcgacgatctgtctttgaacgaacgctctagtttagaggctttcattttattatgtagcggtggcaccctggaaaactccagctttggtgaatttctgcattggtgggcaatgtcgggttacacgtatcagggctgtatggattgtttaatctcctataaatttaaggatggccagagtgcgttcgcgcgtcgcttctgggaagaagccgctggcactggccgtctgggctatgtctttggttgtccggtgcgttctgtggtgaacgaacgcgacgcagtacgtgttaccgcacgtgacggtcgcgaattcgcagcgaaacgtttggtttgcacgattccgctgaacgtattgagttctgttcattttagcccaccactgtccccgcaacgcatggccgctgcgaacattggccatgttaaccagtgcgtcaaagtgcatgcggaagtcagttgcccagatatgcgttcatggtcgggtatctcctatccgttcaacaaattagcctacgctatcggcgatggcacgaccccagcgggtaatacgcatattgtgtgccttgggggggcccataatcatatccagccggaagaggacgtggaagcaacgaagatggccgttgaaaacatgtcgcctgggaatatggatatcaaacgtctggtcttccacaactggtgcaaggatgaatttgccaaaggcgcgtggttcttcgcccctccacagctgctgtcaaagagcctggatgaacgtcgctgtcgtcacggtaatgtcctgtttgcaaactccgattgggccttaggttggcgtggttttatcgatggtgctatcgaggagggcacccgcgcagcggttactgtaattgaggaactgcgtcctgcgcctgcggtgcgttcccacctg

SEQ ID NO: 920 - protein, 495 aa, synthetic construct
  REGION 1..495: note = Variant of monoamine oxidase
MTSRDGYQWTPETGLTQGVPSLGVISPPTNIEDTDKDGPWDVIVIGGGYCGLTATRDLTVAGFKTLLLEARDRIGGRSWSSNIDGYPYEMGGTWVHWHQSHVWREITRYKMHNALSPSFNFSRGVNHFQLRTNPTTSTYMTHEAEDELLRSALHKFTNVDGTNGRTVLPFPHDMFYVPEFRKYDEMSYSERIDQIRDDLSLNERSSLEAFILLCSGGTLENSSFGEFLHWWAMSGYTYQGCMDCLISYKFKDGQSAFARRFWEEAAGTGRLGYVFGCPVRSVVNERDAVRVTARDGREFAAKRLVCTIPLNVLSSVHFSPPLSPQRMAAANIGHVNQCVKVHAEVSCPDMRSWSGISYPFNKLAYAIGDGTTPAGNTHIVCLGGAHNHIQPEEDVEATKMAVENMSPGNMDIKRLVFHNWCKDEFAKGAWFFAPPQLLSKSLDERRCRHGNVLFANSDWALGWRGFIDGAIEEGTRAAVTVIEELRPAPAVRSHL

SEQ ID NO: 921 - DNA, 1485 bp, synthetic construct
  misc_feature 1..1485: note = Variant of monoamine oxidase
  source 1..1485: mol_type = other DNA
atgaccagccgcgacggctatcagtggaccccggaaacgggtctgacccagggcgtaccgtccctgggtgtcatttcgccgccgactaacatcgaagataccgataaggacgggccttgggatgtcattgtcattgggggcgggtattgtgggctgaccgcaacccgtgatttaaccgtcgcagggttcaagacgctgctgctggaggcccgtgatcgtattggtggccgctcctggagcagtaatattgacggttacccgtatgagatgggtggcacttgggttcattggcatcaatcgcacgtgtggcgtgaaatcacgcgttataaaatgcacaacgcgctgtctccatcatttaacttttcacgtggcgtgaatcacttccaactgcgtaccaatccgaccaccagtacgtacatgacgcacgaagcgtcggctgaactgatgcgtagcgcattgcttaaattcaccaatgtcgacggcactaatggccgtacagtgttgccgttcccacatgatatgttttatgtgccggaatttcgcaagtatgacgaaatgtcatattccgaacgcattgaccagatccgcgacgaactgtctttgaacgaacgctctagtttagaggctttcattttattatgtagcggtggcaccctggaaaactccagctttggtgaatttctgcattggtgggcaatgtcgggttacacgtatcagggctgtatggattgtttaatgtcctataaatttaaggatggccagagtgcgttcgcgcgtcgcttctgggaagaagccgctggcactggccgtctgggctatgtctttggtactccggtgcgttctgtggtgaacgaacgcgacgcagtacgtgttaccgcacgtgacggtcgcgaattcgcagcgaaacgtttggtttgcacgattccgctgaacgtattgagttctgttcattttagcccaccactgtccccgcaacgcatggccgctgcgaacattggccatgttaaccagtgcgtcaaagtgcatgcggaagtcagtaacaaggatatgcgttcatggtcgggtatctcctatccgttcaacaaattagcctacgctatcggcgatggcacgaccccagcgggtaatacgcatattgtgtgccttgggggggcccataatcatatccagccggaagaggacgtggaagcaacgaagatggccgttgaaaacatgtcgcctgggaatatggatatcaaacgtctggtcttccacaactggtgcaaggatgaatttgccaaaggcgcgtggttcttcgcccctccacagctgctgtcaaagagcctggatgaactgcgctgtcgtcacggtaatgtcctgtttgcaaactccgattgggccttaggttggcgtggttttatcgatggtgctatcgaggagggcacccgcgcagcggttactgtaattgaggaactgcgtcctgcgcctgcggtgcgttcccacctg

SEQ ID NO: 922 - protein, 495 aa, synthetic construct
  REGION 1..495: note = Variant of monoamine oxidase
MTSRDGYQWTPETGLTQGVPSLGVISPPTNIEDTDKDGPWDVIVIGGGYCGLTATRDLTVAGFKTLLLEARDRIGGRSWSSNIDGYPYEMGGTWVHWHQSHVWREITRYKMHNALSPSFNFSRGVNHFQLRTNPTTSTYMTHEASAELMRSALLKFTNVDGTNGRTVLPFPHDMFYVPEFRKYDEMSYSERIDQIRDELSLNERSSLEAFILLCSGGTLENSSFGEFLHWWAMSGYTYQGCMDCLMSYKFKDGQSAFARRFWEEAAGTGRLGYVFGTPVRSVVNERDAVRVTARDGREFAAKRLVCTIPLNVLSSVHFSPPLSPQRMAAANIGHVNQCVKVHAEVSNKDMRSWSGISYPFNKLAYAIGDGTTPAGNTHIVCLGGAHNHIQPEEDVEATKMAVENMSPGNMDIKRLVFHNWCKDEFAKGAWFFAPPQLLSKSLDELRCRHGNVLFANSDWALGWRGFIDGAIEEGTRAAVTVIEELRPAPAVRSHL

SEQ ID NO: 923 - DNA, 1485 bp, synthetic construct
  misc_feature 1..1485: note = Variant of monoamine oxidase
  source 1..1485: mol_type = other DNA
atgaccagccgcgacggctatcagtggaccccggaaacgggtctgacccagggcgtaccgtccctgggtgtcatttcgccgccgactaacatcgaagataccgataaggacgggccttgggatgtcattgtcattgggggcgggtattgtgggctgaccgcaacccgtgatttaaccgtcgcagggttcaagacgctgctgctggaggcccgtgatcgtattggtggccgctcctggagcagtaatattgacggttacccgtatgagatgggtggcacttgggttcattggcatcaatcgcacgtgtggcgtgaaatcacgcgttataaaatgcacaacgcgctgtctccatcatttaacttttcacgtggcgtgaatcacttccaactgcgtaccaatccgaccaccagtacgtacatgacgcacgaagcgtcggctgaactgctgcgtagcgcattgcataaattcaccaatgtcgacggcactaatggccgtacagtgttgccgttcccacatgatatgttttatgtgccggaatttcgcaagtatgacgaaatgtcatattccgaacgcattgaccagatccgcgacgaactgtctttgaacgaacgctctagtttagaggctttcattttattatgtagcggtggcaccctggaaaactccagctttggtgaatttctgcattggtgggcaatgtcgggttacacgtatcagggctgtatggattgtttaatgtcctataaatttaaggatggccagagtgcgttcgcgcgtcgcttctgggaagaagccgctggcactggccgtctgggctatgtctttggttgcccggtgcgttctgtggtgaacgaacgcgacgcagtacgtgttaccgcacgtgacggtcgcgaattcgcagcgaaacgtttggtttgcacgattccgctgaacgtattgagttctgttcattttagcccaccactgtccccgcaacgcatggccgctgcgaacattggccatgttaaccagtgcgtcaaagtgcatgcggaagtcagtaacaaggatatgcgttcatggtcgggtatctcctatccgttcaacaaattagcctacgctatcggcgatggcacgaccccagcgggtaatacgcatattgtgtgccttgggggggcccataatcatatccagccggaagaggacgtggaagcaacgaagatggccgttgaaaacatgtcgcctgggaatatggatatcaaacgtctggtcttccacaactggtgcaaggatgaatttgccaaaggcgcgtggttcttcgcccctccacagctgctgtcaaagagcctggatgaactgcgcgcacgtcacggtaatgtcctgtttgcaaactccgattgggccttaggttggcgtggttttatcgatggtgctatcgaggagggcacccgcgcagcggttactgtaattgaggaactgcgtcctgcgcctgcggtgcgttcccacctg

SEQ ID NO: 924 - protein, 495 aa, synthetic construct
  REGION 1..495: note = Variant of monoamine oxidase
MTSRDGYQWTPETGLTQGVPSLGVISPPTNIEDTDKDGPWDVIVIGGGYCGLTATRDLTVAGFKTLLLEARDRIGGRSWSSNIDGYPYEMGGTWVHWHQSHVWREITRYKMHNALSPSFNFSRGVNHFQLRTNPTTSTYMTHEASAELLRSALHKFTNVDGTNGRTVLPFPHDMFYVPEFRKYDEMSYSERIDQIRDELSLNERSSLEAFILLCSGGTLENSSFGEFLHWWAMSGYTYQGCMDCLMSYKFKDGQSAFARRFWEEAAGTGRLGYVFGCPVRSVVNERDAVRVTARDGREFAAKRLVCTIPLNVLSSVHFSPPLSPQRMAAANIGHVNQCVKVHAEVSNKDMRSWSGISYPFNKLAYAIGDGTTPAGNTHIVCLGGAHNHIQPEEDVEATKMAVENMSPGNMDIKRLVFHNWCKDEFAKGAWFFAPPQLLSKSLDELRARHGNVLFANSDWALGWRGFIDGAIEEGTRAAVTVIEELRPAPAVRSHL

SEQ ID NO: 925 - DNA, 1485 bp, synthetic construct
  misc_feature 1..1485: note = Variant of monoamine oxidase
  source 1..1485: mol_type = other DNA
atgaccagccgcgacggctatcagtggaccccggaaacgggtctgacccagggcgtaccgtccctgggtgtcatttcgccgccgactaacatcgaagataccgataaggacgggccttgggatgtcattgtcattgggggcgggtattgtgggctgaccgcaacccgtgatttaaccgtcgcagggttcaagacgctgctgctggaggcccgtgatcgtattggtggccgctcctggagcagtaatattgacggttacccgtatgagatgggtggcacttgggttcattggcatcaaccgcacgtgtggcgtgaaatcacgcgttataaaatgcacaacgcgctgtctccatcatttaacttttcacgtggcgtgaatcacttccaactgcgtaccaatccgaccaccagtacgtacatgacgcacgaagcggaggatgaactgctgcgtagcgcattgcataaattcaccaatgtcgacggcactaatggccgtacagtgttgccgttcccacatgatatgttttatgtgccggaatttcgcaagtatgacgaaatgtcatattccgaacgcattgaccagatccgcgacgaactgtctttgaacgaacgctctagtttagaggctttcattttattatgtagcggtggcaccctggaaaactccagctttggtgaatttctgcattggtgggcaatgtcgggttacacgtatcagggctgtattgattgtttaatgtcctataaatttaaggatggccagagtgcgttcgcgcgtcgcttctgggaagaagccgctggcactggccgtctgggctatgtctttggtactccggtgcgttctgtggtgaacgaacgcgacgcagtacgtgttaccgcacgtgacggtcgcgaattcgcagcgaaacgtttggtttgcacgattccgctgaacgtattgagttctgttcattttagcccaccactgtccccgcaacgcatggccgctgcgaacattggccatgttaaccagtgcgtcaaagtgcatgcggaagtcagttgcccagatatgcgttcatggtcgggtatctcctatccgttcaacaaattagcctacgctatcggcgatggcacgaccccagcgggtaatacgcatattgtgtgccttgggggggcccataatcatatccagccggaagaggacgtggaagcaacgaagatggccgttgaaaacatgtcgcctgggaatatggatatcaaacgtctggtcttccacaactggtgcaaggatgaatttgccaaaggcgcgtggttcttcgcccctccacagctgctgtcaaagagcctggatgaactgcgctgccgtcacggtaatgtcctgtttgcaaactccgattgggccttaggttggcgtggttttatcgatggtgctatcgaggagggcacccgcgcagcggttactgtaattgaggaactgcgtcctgcgcctgcggtgcgttcccacctg

SEQ ID NO: 926 - protein, 495 aa, synthetic construct
  REGION 1..495: note = Variant of monoamine oxidase
MTSRDGYQWTPETGLTQGVPSLGVISPPTNIEDTDKDGPWDVIVIGGGYCGLTATRDLTVAGFKTLLLEARDRIGGRSWSSNIDGYPYEMGGTWVHWHQPHVWREITRYKMHNALSPSFNFSRGVNHFQLRTNPTTSTYMTHEAEDELLRSALHKFTNVDGTNGRTVLPFPHDMFYVPEFRKYDEMSYSERIDQIRDELSLNERSSLEAFILLCSGGTLENSSFGEFLHWWAMSGYTYQGCIDCLMSYKFKDGQSAFARRFWEEAAGTGRLGYVFGTPVRSVVNERDAVRVTARDGREFAAKRLVCTIPLNVLSSVHFSPPLSPQRMAAANIGHVNQCVKVHAEVSCPDMRSWSGISYPFNKLAYAIGDGTTPAGNTHIVCLGGAHNHIQPEEDVEATKMAVENMSPGNMDIKRLVFHNWCKDEFAKGAWFFAPPQLLSKSLDELRCRHGNVLFANSDWALGWRGFIDGAIEEGTRAAVTVIEELRPAPAVRSHL

SEQ ID NO: 927 - DNA, 1485 bp, synthetic construct
  misc_feature 1..1485: note = Variant of monoamine oxidase
  source 1..1485: mol_type = other DNA
atgaccagccgcgacggctatcagtggaccccggaaacgggtctgacccagggcgtaccgtccctgggtgtcatttcgccgccgactaacatcgaagataccgataaggacgggccttgggatgtcattgtcattgggggcgggtattgtgggctgaccgcaacccgtgatttaaccgtcgcagggttcaagacgctgctgctggaggcccgtgatcgtattggtggccgctcctggagcagtaatattgacggttacccgtatgagatgggtggcacttgggttcattggcatcaatctcacgtgtggcgtgaaatcacgcgttataaaatgcacaacgcgctgtctccatcatttaactgttcacgtggcgtgaatcacttccaactgcgtaccaatccgaccaccagtacgtacatgacgcacgaagcggaggatgaactgctgcgtagcgcattgcataaattcaccaatgtcgacggcactaatggccgtacagtgttgccgttcccacatgatatgttttatgtgccggaatttcgcaagtatgacgaaatgtcatattccgaacgcattgaccagatccgcgacgatctgtctttgaacgaacgctctagtttagaggctttcattttattatgtagcggtggcaccctggaaaactccagctttggtgaatttctgcattggtgggcaatgtcgggttacacgtatcagggctgtatggattgtttaatctcctataaatttaaggatggccagagtgcgttcgcgcgtcgcttctgggaagaagccgctggcactggccgtctgggctatgtctttggttgcccggtgcgttctgtggtgaacgaacgcgacgcagtacgtgttaccgcacgtgacggtcgcgaattcgcagcgaaacgtttggtttgcacgattccgctgaacgtattgagttctgttcattttagcccaccactgtccccgcaacgcatggccgctgcgaacattggccatgttaaccagtgcgtcaaagtgcatgcggaagtcagtaacccagatatgcgttcatggtcgggtatctcctatccgttcaacaaattagcctacgctatcggcgatggcacgaccccagcgggtaatacgcatattgtgtgccttgggggggcccataatcatatccagccggaagaggacgtggaagcaacgaagatggccgttgaaaacatgtcgcctgggaatatggatatcaaacgtctggtcttccacaactggtgcaaggatgaatttgccaaaggcgcgtggttcttcgcccctccacagctgctgtcaaagagcctggatgaacgtcgcgcacgtcacggtaatgtcctgtttgcaaactccgattgggccttaggttggcgtggttttatcgatggtgctatcgaggagggcacccgcgcagcggttactgtaattgaggaactgcgtcctgcgcctgcggtgcgttcccacctg

SEQ ID NO: 928 - protein, 495 aa, synthetic construct
  REGION 1..495: note = Variant of monoamine oxidase
MTSRDGYQWTPETGLTQGVPSLGVISPPTNIEDTDKDGPWDVIVIGGGYCGLTATRDLTVAGFKTLLLEARDRIGGRSWSSNIDGYPYEMGGTWVHWHQSHVWREITRYKMHNALSPSFNCSRGVNHFQLRTNPTTSTYMTHEAEDELLRSALHKFTNVDGTNGRTVLPFPHDMFYVPEFRKYDEMSYSERIDQIRDDLSLNERSSLEAFILLCSGGTLENSSFGEFLHWWAMSGYTYQGCMDCLISYKFKDGQSAFARRFWEEAAGTGRLGYVFGCPVRSVVNERDAVRVTARDGREFAAKRLVCTIPLNVLSSVHFSPPLSPQRMAAANIGHVNQCVKVHAEVSNPDMRSWSGISYPFNKLAYAIGDGTTPAGNTHIVCLGGAHNHIQPEEDVEATKMAVENMSPGNMDIKRLVFHNWCKDEFAKGAWFFAPPQLLSKSLDERRARHGNVLFANSDWALGWRGFIDGAIEEGTRAAVTVIEELRPAPAVRSHL

SEQ ID NO: 929 - DNA, 1485 bp, synthetic construct
  misc_feature 1..1485: note = Variant of monoamine oxidase
  source 1..1485: mol_type = other DNA
atgaccagccgcgacggctatcagtggaccccggaaacgggtctgacccagggcgtaccgtccctgggtgtcatttcgccgccgactaacatcgaagataccgataaggacgggccttgggatgtcattgtcattgggggcgggtattgtgggctgaccgcaacccgtgatttaaccgtcgcagggttcaagacgctgctgctggaggcccgtgatcgtattggtggccgctcctggagcagtaatattgacggttacccgtatgagatgggtggcacttgggttcattggcatcaaccgcacgtgtggcgtgaaatcacgcgttataaaatgcacaacgcgctgtctccatcatttaacttttcacgtggcgtgaatcacttccaactgcgtaccaatccgaccaccagtacgtacatgacgcacgaagcgggggatgaactgatgcgtagcgcattgcataaattcaccaatgtcgacggcactaatggccgtacagtgttgccgttcccacatgatatgttttatgtgccggaatttcgcaagtatgacgaaatgtcatattccgaacgcattgaccagatccgcgacgatctgtctttgaacgaacgctctagtttagaggctttcattttattatgtagcggtggcaccctggaaaactccagctttggtgaatttctgcattggtgggcaatgtcgggttacacgtatcagggctgtatggattgtttaatctcctataaatttaagggtggccagagtgcgttcgcgcgtcgcttctgggaagaagccgctggcactggccgtctgggctatgtctttggttgtccggtgcgttctgtggtgaacgaacgcgacgcagtacgtgttaccgcacgtgacggtcgcgaattcgcagcgaaacgtttggtttgcacgattccgctgaacgtattgagttctgttcattttagcccaccactgtccccgcaacgcatggccgctgcgaacattggccatgttaaccagtgcgtcaaagtgcatgcggaagtcagttgcaaggatatgcgttcatggtcgggtatctcctatccgttcaacaaattagcctacgctatcggcgatggcacgaccccagcgggtaatacgcatattgtgtgccttgggggggcccataatcatatccagccggaagaggacgtggaagcaacgaagatggccgttgaaaacatgtcgcctgggaatatggatatcaaacgtctggtcttccacaactggtgcaaggatgaatttgccaaaggcgcgtggttcttcgcccctccacagctgctgtcaaagagcctggatgaacgtcgctgtcgtcacggtaatgtcctgtttgcaaactccgattgggccttaggttggcgtggttttatcgatggtgctatcgaggagggcacccgcgcagcggttactgtaattgaggaactgcgtcctgcgcctgcggtgcgttcccacctg

SEQ ID NO: 930 - protein, 495 aa, synthetic construct
  REGION 1..495: note = Variant of monoamine oxidase
MTSRDGYQWTPETGLTQGVPSLGVISPPTNIEDTDKDGPWDVIVIGGGYCGLTATRDLTVAGFKTLLLEARDRIGGRSWSSNIDGYPYEMGGTWVHWHQPHVWREITRYKMHNALSPSFNFSRGVNHFQLRTNPTTSTYMTHEAGDELMRSALHKFTNVDGTNGRTVLPFPHDMFYVPEFRKYDEMSYSERIDQIRDDLSLNERSSLEAFILLCSGGTLENSSFGEFLHWWAMSGYTYQGCMDCLISYKFKGGQSAFARRFWEEAAGTGRLGYVFGCPVRSVVNERDAVRVTARDGREFAAKRLVCTIPLNVLSSVHFSPPLSPQRMAAANIGHVNQCVKVHAEVSCKDMRSWSGISYPFNKLAYAIGDGTTPAGNTHIVCLGGAHNHIQPEEDVEATKMAVENMSPGNMDIKRLVFHNWCKDEFAKGAWFFAPPQLLSKSLDERRCRHGNVLFANSDWALGWRGFIDGAIEEGTRAAVTVIEELRPAPAVRSHL

SEQ ID NO: 931 - DNA, 1485 bp, synthetic construct
  misc_feature 1..1485: note = Variant of monoamine oxidase
  source 1..1485: mol_type = other DNA
atgaccagccgcgacggctatcagtggaccccggaaacgggtctgacccagggcgtaccgtccctgggtgtcatttcgccgccgactaacatcgaagataccgataaggacgggccttgggatgtcattgtcattgggggcgggtattgtgggctgaccgcaacccgtgatttaaccgtcgcagggttcaagacgctgctgctggaggcccgtgatcgtattggtggccgctcctggagcagtaatattgacggttacccgtatgagatgggtggcacttgggttcattggcatcaatcgcacgtgtggcgtgaaatcacgcgttataaaatgcacaacgcgctgtctccatcatttaacttttcacgtggcgtgaatcacttccaactgcgtaccaatccgaccaccagtacgtacatgacgcacgaagcggaggatgaactgctgcgtagcgcattgcataaattcaccaatgtcgacggcactaatggccgtacagtgttgccgttcccacatgatatgttttatgtgccggaatttcgcaagtatgacgaaatgtcatattccgaacgcattgaccagatccgcgacgaactgtctttgaacgaacgctctagtttagaggctttcattttattatgtagcggtggcaccctggaaaactccagctttggtgaatttctgcattggtgggcaatgtcgggttacacgtatcagggctgtatggattgtttaatttcctataaatttaaggatggccagagtgcgttcgcgcgtcgcttctgggaagaagccgctggcactggccgtctgggctatgtctttggtactccggtgcgttctgtggtgaacgaacgcgacgcagtacgtgttaccgcacgtgacggtcgcgaattcgcagcgaaacgtttggtttgcacgattccgctgaacgtattgagttctgttcattttagcccaccactgtccccgcaacgcatggccgctgcgaacattggccatgttaaccagtgcgtcaaagtgcatgcggaagtcagtaacccagatatgcgttcatggtcgggtatctcctatccgttcaacaaattagcctacgctatcggcgatggcacgaccccagcgggtaatacgcatattgtgtgccttgggggggcccataatcatatccagccggaagaggacgtggaagcaacgaagatggccgttgaaaacatgtcgcctgggaatatggatatcaaacgtctggtcttccacaactggtgcaaggatgaatttgccaaaggcgcgtggttcttcgcccctccacagctgctgtcaaagagcctggatgaactgcgcgcacgtcacggtaatgtcctgtttgcaaactccgattgggccttaggttggcgtggttttatcgatggtgctatcgaggagggcacccgcgcagcggttactgtaattgaggaactgcgtcctgcgcctgcggtgcgttcccacctg

SEQ ID NO: 932 - protein, 495 aa, synthetic construct
  REGION 1..495: note = Variant of monoamine oxidase
MTSRDGYQWTPETGLTQGVPSLGVISPPTNIEDTDKDGPWDVIVIGGGYCGLTATRDLTVAGFKTLLLEARDRIGGRSWSSNIDGYPYEMGGTWVHWHQSHVWREITRYKMHNALSPSFNFSRGVNHFQLRTNPTTSTYMTHEAEDELLRSALHKFTNVDGTNGRTVLPFPHDMFYVPEFRKYDEMSYSERIDQIRDELSLNERSSLEAFILLCSGGTLENSSFGEFLHWWAMSGYTYQGCMDCLISYKFKDGQSAFARRFWEEAAGTGRLGYVFGTPVRSVVNERDAVRVTARDGREFAAKRLVCTIPLNVLSSVHFSPPLSPQRMAAANIGHVNQCVKVHAEVSNPDMRSWSGISYPFNKLAYAIGDGTTPAGNTHIVCLGGAHNHIQPEEDVEATKMAVENMSPGNMDIKRLVFHNWCKDEFAKGAWFFAPPQLLSKSLDELRARHGNVLFANSDWALGWRGFIDGAIEEGTRAAVTVIEELRPAPAVRSHL

SEQ ID NO: 933 - DNA, 1485 bp, synthetic construct
  misc_feature 1..1485: note = Variant of monoamine oxidase
  source 1..1485: mol_type = other DNA
atgaccagccgcgacggctatcagtggaccccggaaacgggtctgacccagggcgtaccgtccctgggtgtcatttcgccgccgactaacatcgaagataccgataaggacgggccttgggatgtcattgtcattgggggcgggtattgtgggctgaccgcaacccgtgatttaaccgtcgcagggttcaagacgctgctgctggaggcccgtgatcgtattggtggccgctcctggagcagtaatattgacggttacccgtatgagatgggtggcacttgggttcattggcatcaatctcacgtgtggcgtgaaatcacgcgttataaaatgcacaacgcgctgtctccatcatttaacttttcacgtggcgtgaatcacttccaactgcgtaccaatccgaccaccagtacgtacatgacgcacgaagcggaggatgaactgctgcgtagcgcattgcataaattcaccaatgtcgacggcactaatggccgtacagtgttgccgttcccacatgatatgttttatgtgccggaatttcgcaagtatgacgaaatgtcatattccgaacgcattgaccagatccgcgacgaactgtctttgaacgaacgcactagtttagaggctttcattttattatgtagcggtggcaccctggaaaactccagctttggtgaatttctgcattggtgggcaatgtcgggttacacgtatcagggctgtatggattgtttaatctcctataaatttaaggatggccagagtgcgttcgcgcgtcgcttctgggaagaagccgctggcactggccgtctgggctatgtctttggttgtccggtgcgttctgtggtgaacgaacgcgacgcagtacgtgttaccgcacgtgacggtcgcgaattcgcagcgaaacgtttggtttgcacgattccgctgaacgtattgagttctgttcattttagcccaccactgtccccgcaacgcatggccgctgcgaacattggccatgttaaccagtgcgtcaaagtgcatgcggaagtcagttgtccggatatgcgttcatggtcgggtatctcctatccgttcaacaaattagcctacgctatcggcgatggcacgaccccagcgggtaatacgcatattgtgtgccttgggggggcccataatcatatccagccggaagaggacgtggaagcaacgaagatggccgttgaaaacatgtcgcctgggaatatggatatcaaacgtctggtcttccacaactggtgcaaggatgaatttgccaaaggcgcgtggttcttcgcccctccacagctgctgtcaaagagcctggatgaactgcgctgccgtcacggtaatgtcctgtttgcaaactccgattgggccttaggttggcgtggttttatcgatggtgctatcgaggagggcacccgcgcagcggttactgtaattgaggaactgcgtcctgcgcctgcggtgcgttcccacctg

SEQ ID NO: 934 - protein, 495 aa, synthetic construct
  REGION 1..495: note = Variant of monoamine oxidase
MTSRDGYQWTPETGLTQGVPSLGVISPPTNIEDTDKDGPWDVIVIGGGYCGLTATRDLTVAGFKTLLLEARDRIGGRSWSSNIDGYPYEMGGTWVHWHQSHVWREITRYKMHNALSPSFNFSRGVNHFQLRTNPTTSTYMTHEAEDELLRSALHKFTNVDGTNGRTVLPFPHDMFYVPEFRKYDEMSYSERIDQIRDELSLNERTSLEAFILLCSGGTLENSSFGEFLHWWAMSGYTYQGCMDCLISYKFKDGQSAFARRFWEEAAGTGRLGYVFGCPVRSVVNERDAVRVTARDGREFAAKRLVCTIPLNVLSSVHFSPPLSPQRMAAANIGHVNQCVKVHAEVSCPDMRSWSGISYPFNKLAYAIGDGTTPAGNTHIVCLGGAHNHIQPEEDVEATKMAVENMSPGNMDIKRLVFHNWCKDEFAKGAWFFAPPQLLSKSLDELRCRHGNVLFANSDWALGWRGFIDGAIEEGTRAAVTVIEELRPAPAVRSHL

SEQ ID NO: 935 - DNA, 1485 bp, synthetic construct
  misc_feature 1..1485: note = Variant of monoamine oxidase
  source 1..1485: mol_type = other DNA
atgaccagccgcgacggctatcagtggaccccggaaacgggtctgacccagggcgtaccgtccctgggtgtcatttcgccgccgactaacatcgaagataccgataaggacgggccttgggatgtcattgtcattgggggcgggtattgtgggctgaccgcaacccgtgatttaaccgtcgcagggttcaagacgctgctgctggaggcccgtgatcgtattggtggccgctcctggagcagtaatattgacggttacccgtatgagatgggtggcacttgggttcattggcatcaatcgcacgtgtggcgtgaaatcacgcgttataaaatgcacaacgcgctgtctccatcatttaacttttcacgtggcgtgaatcacttccaactgcgtaccaatccgaccaccagtacgtacatgacgcacgaagcggaggatgaactgctgcgtagcgcattgcataaattcaccaatgtcgacggcactaatggccgtacagtgttgccgttcccacatgatatgttttatgtgccggaatttcgcaagtatgacgaaatgtcatattccgaacgcattgaccagatccgcgacgaactgtctttgaacgaacgctctagtttagaggctttcattttattatgtagcggtggcaccctggaaaactccagctttggtgaatttctgcattggtgggcaatgtcgggttacacgtatcagggctgtattgattgtttaatttcctataaatttaaggatggccagagtgcgttcgcgcgtcgcttctgggaagaagccgctggcactggccgtctgggctatgtctttggttgtccggtgcgttctgtggtgaacgaacgcgacgcagtacgtgttaccgcacgtgacggtcgcgaattcgcagcgaaacgtttggtttgcacgattccgctgaacgtattgagttctgttcattttagcccaccactgtccccgcaacgcatggccgctgcgaacattggccatgttaaccagtgcgtcaaagtgcatgcggaagtcagttgcaaggatatgcgttcatggtcgggtatctcctatccgttcaacaaattagcctacgctatcggcgatggcacgaccccagcgggtaatacgcatattgtgtgccttgggggggcccataatcatatccagccggaagaggacgtggaagcaacgaagatggccgttgaaaacatgtcgcctgggaatatggatatcaaacgtctggtcttccacaactggtgcaaggatgaatttgccaaaggcgcgtggttcttcgcccctccacagctgctgtcaaagagcctggatgaactgcgctgtcgtcacggtaatgtcctgtttgcaaactccgattgggccttaggttggcgtggttttatcgatggtgctatcgaggagggcacccgcgcagcggttactgtaattgaggaactgcgtcctgcgcctgcggtgcgttcccacctg

SEQ ID NO: 936 - protein, 495 aa, synthetic construct
  REGION 1..495: note = Variant of monoamine oxidase
MTSRDGYQWTPETGLTQGVPSLGVISPPTNIEDTDKDGPWDVIVIGGGYCGLTATRDLTVAGFKTLLLEARDRIGGRSWSSNIDGYPYEMGGTWVHWHQSHVWREITRYKMHNALSPSFNFSRGVNHFQLRTNPTTSTYMTHEAEDELLRSALHKFTNVDGTNGRTVLPFPHDMFYVPEFRKYDEMSYSERIDQIRDELSLNERSSLEAFILLCSGGTLENSSFGEFLHWWAMSGYTYQGCIDCLISYKFKDGQSAFARRFWEEAAGTGRLGYVFGCPVRSVVNERDAVRVTARDGREFAAKRLVCTIPLNVLSSVHFSPPLSPQRMAAANIGHVNQCVKVHAEVSCKDMRSWSGISYPFNKLAYAIGDGTTPAGNTHIVCLGGAHNHIQPEEDVEATKMAVENMSPGNMDIKRLVFHNWCKDEFAKGAWFFAPPQLLSKSLDELRCRHGNVLFANSDWALGWRGFIDGAIEEGTRAAVTVIEELRPAPAVRSHL

SEQ ID NO: 937 - DNA, 1485 bp, synthetic construct
  misc_feature 1..1485: note = Variant of monoamine oxidase
  source 1..1485: mol_type = other DNA
atgaccagccgcgacggctatcagtggaccccggaaacgggtctgacccagggcgtaccgtccctgggtgtcatttcgccgccgactaacatcgaagataccgataaggacgggccttgggatgtcattgtcattgggggcgggtattgtgggctgaccgcaacccgtgatttaaccgtcgcagggttcaagacgctgctgctggaggcccgtgatcgtattggtggccgctcctggagcagtaatattgacggttacccgtatgagatgggtggcacttgggttcattggcatcaatcgcacgtgtggcgtgaaatcacgcgttataaaatgcacaacgcgctgtctccatcatttaacttttcacgtggcgtgaatcacttccaactgcgtaccaatccgaccaccagtacgtacatgacgcacgaagcggaggatgaactgctgcgtagcgcattgcataaattcaccaatgtcgacggcactaatggccgtacagtgttgccgttcccacatgatatgttttatgtgccggaatttcgcaagtatgacgaaatgtcatattccgaacgcattgaccagatccgcgacgaactgtctttgaacgaacgctctagtttagaggctttcattttattatgtagcggtggcaccctggaaaactccagctttggtgaatttctgcattggtgggcaatgtcgggttacacgtatcagggctgtatggattgtttaatctcctataaatttaaggatggccagagtgcgttcgcgcgtcgcttctgggaagaagccgctggcactggccgtctgggctatgtctttggttgtccggtgcgttctgtggtgaacgaacgcgacgcagtacgtgttaccgcacgtgacggtcgcgaattcgcagcgaaacgtttggtttgcacgattccgctgaacgtattgagttctgttcattttagcccaccactgtccccgcaacgcatggccgctgcgaacattggccatgttaaccagtgcgtcaaagtgcatgcggaagtcagttgcccagatatgcgttcatggtcgggtatctcctatccgttcaacaaattagcctacgctatcggcgatggcacgaccccagcgggtaatacgcatattgtgtgccttgggggggcccataatcatatccagccggaagaggacgtggaagcaacgaagatggccgttgaaaacatgtcgcctgggaatatggatatcaaacgtctggtcttccacaactggtgcaaggatgaatttgccaaaggcgcgtggttcttcgcccctccacagctgctgtcaaagagcctggatgaactgcgcgcacgtcacggtaatgtcctgtttgcaaactccgattgggccttaggttggcgtggttttatcgatggtgctatcgaggagggcacccgcgcagcggttactgtaattgaggaactgcgtcctgcgcctgcggtgcgttcccacctg

SEQ ID NO: 938 - protein, 495 aa, synthetic construct; identical to SEQ ID NO: 158
  REGION 1..495: note = Variant of monoamine oxidase

SEQ ID NO: 939 - DNA, 1485 bp, synthetic construct
  misc_feature 1..1485: note = Variant of monoamine oxidase
  source 1..1485: mol_type = other DNA
atgaccagccgcgacggctatcagtggaccccggaaacgggtctgacccagggcgtaccgtccctgggtgtcatttcgccgccgactaacatcgaagataccgataaggacgggccttgggatgtcattgtcattgggggcgggtattgtgggctgaccgcaacccgtgatttaaccgtcgcagggttcaagacgctgctgctggaggcccgtgatcgtattggtggccgctcctggagcagtaatattgacggttacccgtatgagatgggtggcacttgggttcattggcatcaatcgcacgtgtggcgtgaaatcacgcgttataaaatgcacaacgcgctgtctccatcatttaacttttcacgtggcgtgaatcacttccaactgcgtaccaatccgaccaccagtacgtacatgacgcacgaagcggaggatgaactgctgcgtagcgcattgcataaattcaccaatgtcgacggcactaatggccgtacagtgttgccgttcccacatgatatgttttatgtgccggaatttcgcaagtatgacgaaatgtcatattccgaacgcattgaccagatccgcgacgaactgtctttgaacgaacgctctagtttagaggctttcattttattatgtagcggtggcaccctggaaaactccagctttggtgaatttctgcattggtgggcaatgtcgggttacacgtatcagggctgtatggattgtttaatctcctataaatttaaggatggccagagtgcgttcgcgcgtcgcttctgggaagaagccgctggcactggccgtctgggctatgtctttggttgcccggtgcgttctgtggtgaacgaacgcgacgcagtacgtgttaccgcacgtgacggtcgcgaattcgcagcgaaacgtttggtttgcacgattccgctgaacgtattgagttctgttcattttagcccaccactgtccccgcaacgcatggccgctgcgaacattggccatgttaaccagtgcgtcaaagtgcatgcggaagtcagtaacaaggatatgcgttcatggtcgggtatctcctatccgttcaacaaattagcctacgctatcggcgatggcacgaccccagcgggtaatacgcatattgtgtgccttgggggggcccataatcatatccagccggaagaggacgtggaagcaacgaagatggccgttgaaaacatgtcgcctgggaatatggatatcaaacgtctggtcttccacaactggtgcaaggatgaatttgccaaaggcgcgtggttcttcgcccctccacagctgctgtcaaagagcctggatgaactgcgcgcacgtcacggtaatgtcctgtttgcaaactccgattgggccttaggttggcgtggttttatcgatggtgctatcgaggagggcacccgcgcagcggttactgtaattgaggaactgcgtcctgcgcctgcggtgcgttcccacctg

SEQ ID NO: 940 - protein, 495 aa, synthetic construct
  REGION 1..495: note = Variant of monoamine oxidase
MTSRDGYQWTPETGLTQGVPSLGVISPPTNIEDTDKDGPWDVIVIGGGYCGLTATRDLTVAGFKTLLLEARDRIGGRSWSSNIDGYPYEMGGTWVHWHQSHVWREITRYKMHNALSPSFNFSRGVNHFQLRTNPTTSTYMTHEAEDELLRSALHKFTNVDGTNGRTVLPFPHDMFYVPEFRKYDEMSYSERIDQIRDELSLNERSSLEAFILLCSGGTLENSSFGEFLHWWAMSGYTYQGCMDCLISYKFKDGQSAFARRFWEEAAGTGRLGYVFGCPVRSVVNERDAVRVTARDGREFAAKRLVCTIPLNVLSSVHFSPPLSPQRMAAANIGHVNQCVKVHAEVSNKDMRSWSGISYPFNKLAYAIGDGTTPAGNTHIVCLGGAHNHIQPEEDVEATKMAVENMSPGNMDIKRLVFHNWCKDEFAKGAWFFAPPQLLSKSLDELRARHGNVLFANSDWALGWRGFIDGAIEEGTRAAVTVIEELRPAPAVRSHL

SEQ ID NO: 941 - DNA, 1485 bp, synthetic construct
  misc_feature 1..1485: note = Variant of monoamine oxidase
  source 1..1485: mol_type = other DNA
atgaccagccgcgacggctatcagtggaccccggaaacgggtctgacccagggcgtaccgtccctgggtgtcatttcgccgccgactaacatcgaagataccgataaggacgggccttgggatgtcattgtcattgggggcgggtattgtgggctgaccgcaacccgtgatttaaccgtcgcagggttcaagacgctgctgctggaggcccgtgatcgtattggtggccgctcctggagcagtaatattgacggttacccgtatgagatgggtggcacttgggttcattggcatcaaccgcacgtgtggcgtgaaatcacgcgttataaaatgcacaacgcgctgtctccatcatttaacttttcacgtggcgtgaatcacttccaactgcgtaccaatccgaccaccagtacgtacatgacgcacgaagcggaggatgaactgctgcgtagcgcattgcataaattcaccaatgtcgacggcactaatggccgtacagtgttgccgttcccacatgatatgttttatgtgccggaatttcgcaagtatgacgaaatgtcatattccgaacgcattgaccagatccgcgacgaactgtctttgaacgaacgctctagtttagaggctttcattttattatgtagcggtggcaccctggaaaactccagctttggtgaatttctgcattggtgggcaatgtcgggttacacgtatcagggctgtattgattgtttaatgtcctataaatttaaggatggccagagtgcgttcgcgcgtcgcttctgggaagaagccgctggcactggccgtctgggctatgtctttggttgcccggtgcgttctgtggtgaacgaacgcgacgcagtacgtgttaccgcacgtgacggtcgcgaattcgcagcgaaacgtttggtttgcacgattccgctgaacgtattgagttctgttcattttagcccaccactgtccccgcaacgcatggccgctgcgaacattggccatgttaaccagtgcgtcaaagtgcatgcggaagtcagtaacccagatatgcgttcatggtcgggtatctcctatccgttcaacaaattagcctacgctatcggcgatggcacgaccccagcgggtaatacgcatattgtgtgccttgggggggcccataatcatatccagccggaagaggacgtggaagcaacgaagatggccgttgaaaacatgtcgcctgggaatatggatatcaaacgtctggtcttccacaactggtgcaaggatgaatttgccaaaggcgcgtggttcttcgcccctccacagctgctgtcaaagagcctggatgaactgcgctgtcgtcacggtaatgtcctgtttgcaaactccgattgggccttaggttggcgtggttttatcgatggtgctatcgaggagggcacccgcgcagcggttactgtaattgaggaactgcgtcctgcgcctgcggtgcgttcccacctg

SEQ ID NO: 942 - protein, 495 aa, synthetic construct
  REGION 1..495: note = Variant of monoamine oxidase
MTSRDGYQWTPETGLTQGVPSLGVISPPTNIEDTDKDGPWDVIVIGGGYCGLTATRDLTVAGFKTLLLEARDRIGGRSWSSNIDGYPYEMGGTWVHWHQPHVWREITRYKMHNALSPSFNFSRGVNHFQLRTNPTTSTYMTHEAEDELLRSALHKFTNVDGTNGRTVLPFPHDMFYVPEFRKYDEMSYSERIDQIRDELSLNERSSLEAFILLCSGGTLENSSFGEFLHWWAMSGYTYQGCIDCLMSYKFKDGQSAFARRFWEEAAGTGRLGYVFGCPVRSVVNERDAVRVTARDGREFAAKRLVCTIPLNVLSSVHFSPPLSPQRMAAANIGHVNQCVKVHAEVSNPDMRSWSGISYPFNKLAYAIGDGTTPAGNTHIVCLGGAHNHIQPEEDVEATKMAVENMSPGNMDIKRLVFHNWCKDEFAKGAWFFAPPQLLSKSLDELRCRHGNVLFANSDWALGWRGFIDGAIEEGTRAAVTVIEELRPAPAVRSHL

SEQ ID NO: 943 - DNA, 1485 bp, synthetic construct
  misc_feature 1..1485: note = Variant of monoamine oxidase
  source 1..1485: mol_type = other DNA
atgaccagccgcgacggctatcagtggaccccggaaacgggtctgacccagggcgtaccgtccctgggtgtcatttcgccgccgactaacatcgaagataccgataaggacgggccttgggatgtcattgtcattgggggcgggtattgtgggctgaccgcaacccgtgatttaaccgtcgcagggttcaagacgctgctgctggaggcccgtgatcgtattggtggccgctcctggagcagtaatattgacggttacccgtatgagatgggtggcacttgggttcattggcatcaatcgcacgtgtggcgtgaaatcacgcgttataaaatgcacaacgcgctgtctccatcatttaacttttcacgtggcgtgaatcacttccaactgcgtaccaatccgaccaccagtacgtacatgacgcacgaagcggaggatgaactgctgcgtagcgcattgcataaattcaccaatgtcgacggcactaatggccgtacagtgttgccgttcccacatgatatgttttatgtgccggaatttcgcaagtatgacgaaatgtcatattccgaacgcattgaccagatccgcgacgaactgtctttgaacgaacgctctagtttagaggctttcattttattatgtagcggtggcaccctggaaaactccagctttggtgaatttctgcattggtgggcaatgtcgggttacacgtatcagggctgtattgattgtttaatttcctataaatttaaggatggccagagtgcgttcgcgcgtcgcttctgggaagaagccgctggcactggccgtctgggctatgtctttggttgtccggtgcgttctgtggtgaacgaacgcgacgcagtacgtgttaccgcacgtgacggtcgcgaattcgcagcgaaacgtttggtttgcacgattccgctgaacgtattgagttctgttcattttagcccaccactgtccccgcaacgcatggccgctgcgaacattggccatgttaaccagtgcgtcaaagtgcatgcggaagtcagttgcccagatatgcgttcatggtcgggtatctcctatccgttcaacaaattagcctacgctatcggcgatggcacgaccccagcgggtaatacgcatattgtgtgccttgggggggcccataatcatatccagccggaagaggacgtggaagcaacgaagatggccgttgaaaacatgtcgcctgggaatatggatatcaaacgtctggtcttccacaactggtgcaaggatgaatttgccaaaggcgcgtggttcttcgcccctccacagctgctgtcaaagagcctggatgaacgtcgcgcacgtcacggtaatgtcctgtttgcaaactccgattgggccttaggttggcgtggttttatcgatggtgctatcgaggagggcacccgcgcagcggttactgtaattgaggaactgcgtcctgcgcctgcggtgcgttcccacctg

SEQ ID NO: 944 - protein, 495 aa, synthetic construct
  REGION 1..495: note = Variant of monoamine oxidase
MTSRDGYQWTPETGLTQGVPSLGVISPPTNIEDTDKDGPWDVIVIGGGYCGLTATRDLTVAGFKTLLLEARDRIGGRSWSSNIDGYPYEMGGTWVHWHQSHVWREITRYKMHNALSPSFNFSRGVNHFQLRTNPTTSTYMTHEAEDELLRSALHKFTNVDGTNGRTVLPFPHDMFYVPEFRKYDEMSYSERIDQIRDELSLNERSSLEAFILLCSGGTLENSSFGEFLHWWAMSGYTYQGCIDCLISYKFKDGQSAFARRFWEEAAGTGRLGYVFGCPVRSVVNERDAVRVTARDGREFAAKRLVCTIPLNVLSSVHFSPPLSPQRMAAANIGHVNQCVKVHAEVSCPDMRSWSGISYPFNKLAYAIGDGTTPAGNTHIVCLGGAHNHIQPEEDVEATKMAVENMSPGNMDIKRLVFHNWCKDEFAKGAWFFAPPQLLSKSLDERRARHGNVLFANSDWALGWRGFIDGAIEEGTRAAVTVIEELRPAPAVRSHL

SEQ ID NO: 945 - DNA, 1485 bp, synthetic construct
  misc_feature 1..1485: note = Variant of monoamine oxidase
  source 1..1485: mol_type = other DNA
atgaccagccgcgacggctatcagtggaccccggaaacgggtctgacccagggcgtaccgtccctgggtgtcatttcgccgccgactaacatcgaagataccgataaggacgggccttgggatgtcattgtcattgggggcgggtattgtgggctgaccgcaacccgtgatttaaccgtcgcagggttcaagacgctgctgctggaggcccgtgatcgtattggtggccgctcctggagcagtaacattgacggttacggttatgagatgggtggcacttgggttcattggcatcaatctcacgtgtggcgtgaaatcacgcgttataaaatgcacaacgcgctgtctaaatcatttaacttttcacgtggcgtgaatcacttccaactgcgtaccaatccgaccaccagtacgtacatgacgcacgaagcggaggatgaactgctgcgtagcgcattgcataaattcaccaatgtcgacggcactaatggccgtacagtgttgccgttcccacatgatatgttttatgtgccggaatttcgcaagtatgacgaaatgtcatattccgaacgcattgaccagatccgcgacgaactgtctttgaacgaacgctctagtttagaggctttcattttattatgtagcggtggcacctcggaaaactccagctttggtgaatttctgcattggtgggcaatgtcgggttacacgtatcagggctgtatggattgtttaatctcctataaatttaaggatggccagagtgcgttcgcgcgtcgcttctgggaagaagccgctggcactggccgtctgggctatgtctttggttgtccggtgcgttctgtggtgaacgaacgcgacgcagtacgtgttaccgcacgtgacggtcgcgaattcgcagcgaaacgtttggtttgcacgattccgtcgaacgtattgagttctgttcattttagcccaccactgtccccgcaacgcatggccgctgcgaacattggccatgttaaccagagcgtcaaagtgcatgcggaagtcagttgtccggatatgcgttcatggtcgggtatctcctatccgttcaacaaattagcctacgctatcggcgatggcacgaccccagcgggtaatacgcatattgtgtgccttgggggggcccataatcatatccagccggaagaggacgtggaagcaacgaagatggccgttgaaaacatgtcgcctgggaatatggatatcaaacgtctggtcttccacaactggtgcaaggatgaatttgccaaaggcgcgtggttcttcgcccctccacagctgctgtcaaagagcctggatgaactgcgctgccgtcacggtaatgtcctgtttgcaaactccgattgggccttaggttggcgtggttttatcgatggtgctatcgaggagggcacccgcgcagcggttactgtaattgaggaactgcgtcctgcgcctgcggtgcgttcccacctg

SEQ ID NO: 946 - protein, 495 aa, synthetic construct
  REGION 1..495: note = Variant of monoamine oxidase
MTSRDGYQWTPETGLTQGVPSLGVISPPTNIEDTDKDGPWDVIVIGGGYCGLTATRDLTVAGFKTLLLEARDRIGGRSWSSNIDGYGYEMGGTWVHWHQSHVWREITRYKMHNALSKSFNFSRGVNHFQLRTNPTTSTYMTHEAEDELLRSALHKFTNVDGTNGRTVLPFPHDMFYVPEFRKYDEMSYSERIDQIRDELSLNERSSLEAFILLCSGGTSENSSFGEFLHWWAMSGYTYQGCMDCLISYKFKDGQSAFARRFWEEAAGTGRLGYVFGCPVRSVVNERDAVRVTARDGREFAAKRLVCTIPSNVLSSVHFSPPLSPQRMAAANIGHVNQSVKVHAEVSCPDMRSWSGISYPFNKLAYAIGDGTTPAGNTHIVCLGGAHNHIQPEEDVEATKMAVENMSPGNMDIKRLVFHNWCKDEFAKGAWFFAPPQLLSKSLDELRCRHGNVLFANSDWALGWRGFIDGAIEEGTRAAVTVIEELRPAPAVRSHL

SEQ ID NO: 947 - DNA, 1485 bp, synthetic construct
  misc_feature 1..1485: note = Variant of monoamine oxidase
  source 1..1485: mol_type = other DNA
atgaccagccgcgacggctatcagtggaccccggaaacgggtctgacccagggcgtaccgtccctgggtgtcatttcgccgccgactaacatcgaagataccgataaggacgggccttgggatgtcattgtcattgggggcgggtattgtgggctgaccgcaacccgtgatttaaccgtcgcagggttcaagacgctgctgctggaggcccgtgatcgtattggtggccgctcctggagcagtaatattgacggttacccgtatgagatgggtggcacttgggttcattggcatcaatcgcacgtgtggcgtgaaatcacgcgttataaaatgcacaacgcgctgtctccatcatttaacttttcacgtggcgtgaatcacttccaactgcgtaccaatccgaccaccagtacgtacatgacgcacgaagcgggggatgaactgctgcgtagcgcattgcatatattcaccaatgtcgacggcactaatggccgtacagtgttgccgttcccacatgatatgttttatgtgccggaatttcgcaagtatgacgaaatgtcatattccgaacgcattgaccagatccgcgacgaactgtctttgaacgaacgctctagtttagaggctttcattttattatgtagcggtggcaccctggaaaactccagctttggtgaatttctgcattggtgggcaatgtcgggttacacgtatcagggctgtatggattgtttaatctcctataaatttaaggatggccagagtgcgttcgcgcgtcgcttctgggaagaagccgctggcactggccgtctgggctatgtctttggttgcccggtgcgttctgtggtgaacgaacgcgacgcagtacgtgttaccgcacgtgacggtcgcgaattcgcagcgaaacgtttggtttgcacgattccgctgaacgtattgagttctgttcattttagcccaccactgtccccgcaacgcatggccgctgcgaacattggccatgttaaccagtgcgtcaaagtgcatgcggaagtcagttgtccggatatgcgttcatggtcgggtatctcctatccgttcaacaaattagcctacgctatcggcgatggcacgaccccagcgggtaatacgcatattgtgtgccttgggggggcccataatcatatccagccggaagaggacgtggaagcaacgaagatggccgttgaaaacatgtcgcctgggaatatggatatcaaacgtctggtcttccacaactggtgcaaggatgaatttgccaaaggcgcgtggttcttcgcccctccacagctgctgtcaaagagcctggatgaacgtcgcgcacgtcacggtaatgtcctgtttgcaaactccgattgggccttaggttggcgtggttttatcgatggtgctatcgaggagggcacccgcgcagcggttactgtaattgaggaactgcgtcctgcgcctgcggtgcgttcccacctg

SEQ ID NO: 948 - protein, 495 aa, synthetic construct
  REGION 1..495: note = Variant of monoamine oxidase
MTSRDGYQWTPETGLTQGVPSLGVISPPTNIEDTDKDGPWDVIVIGGGYCGLTATRDLTVAGFKTLLLEARDRIGGRSWSSNIDGYPYEMGGTWVHWHQSHVWREITRYKMHNALSPSFNFSRGVNHFQLRTNPTTSTYMTHEAGDELLRSALHIFTNVDGTNGRTVLPFPHDMFYVPEFRKYDEMSYSERIDQIRDELSLNERSSLEAFILLCSGGTLENSSFGEFLHWWAMSGYTYQGCMDCLISYKFKDGQSAFARRFWEEAAGTGRLGYVFGCPVRSVVNERDAVRVTARDGREFAAKRLVCTIPLNVLSSVHFSPPLSPQRMAAANIGHVNQCVKVHAEVSCPDMRSWSGISYPFNKLAYAIGDGTTPAGNTHIVCLGGAHNHIQPEEDVEATKMAVENMSPGNMDIKRLVFHNWCKDEFAKGAWFFAPPQLLSKSLDERRARHGNVLFANSDWALGWRGFIDGAIEEGTRAAVTVIEELRPAPAVRSHL

SEQ ID NO: 949 - DNA, 1485 bp, synthetic construct
  misc_feature 1..1485: note = Variant of monoamine oxidase
  source 1..1485: mol_type = other DNA
atgaccagccgcgacggctatcagtggaccccggaaacgggtctgacccagggcgtaccgtccctgggtgtcatttcgccgccgactaacatcgaagataccgataaggacgggccttgggatgtcattgtcattgggggcgggtattgtgggctgaccgcaacccgtgatttaaccgtcgcagggttcaagacgctgctgctggaggcccgtgatcgtattggtggccgctcctggagcagtaatattgacggttacccgtatgagatgggtggcacttgggttcattggcatcaatcgcacgtgtggcgtgaaatcacgcgttataaaatgcacaacgcgctgtctccatcatttaacttttcacgtggcgtgaatcacttccaactgcgtaccaatccgaccaccagtacgtacatgacgcacgaagcggaggctgaactgctgcgtagcgcattgcataaattcaccaatgtcgacggcactaatggccgtacagtgttgccgttcccacatgatatgttttatgtgccggaatttcgcaagtatgacgaaatgtcatattccgaacgcattgaccagatccgcgacgaactgtctttgaacgaacgctctagtttagaggctttcattttattatgtagcggtggcaccctggaaaactccagctttggtgaatttctgcattggtgggcaatgtcgggttacacgtatcagggctgtattgattgtttaatgtcctataaatttaaggatggccagagtgcgttcgcgcgtcgcttctgggaagaagccgctggcactggccgtctgggctatgtctttggtactccggtgcgttctgtggtgaacgaacgcgacgcagtacgtgttaccgcacgtgacggtcgcgaattcgcagcgaaacgtttggtttgcacgattccgctgaacgtattgagttctgttcattttagcccaccactgtccccgcaacgcatggccgctgcgaacattggccatgttaaccagtgcgtcaaagtgcatgcggaagtcagtaacaaggatatgcgttcatggtcgggtatctcctatccgttcaacaaattagcctacgctatcggcgatggcacgaccccagcgggtaatacgcatattgtgtgccttgggggggcccataatcatatccagccggaagaggacgtggaagcaacgaagatggccgttgaaaacatgtcgcctgggaatatggatatcaaacgtctggtcttccacaactggtgcaaggatgaatttgccaaaggcgcgtggttcttcgcccctccacagctgctgtcaaagagcctggatgaacgtcgcgcacgtcacggtaatgtcctgtttgcaaactccgattgggccttaggttggcgtggttttatcgatggtgctatcgaggagggcacccgcgcagcggttactgtaattgaggaactgcgtcctgcgcctgcggtgcgttcccacctg

SEQ ID NO: 950 - protein, 495 aa, synthetic construct
  REGION 1..495: note = Variant of monoamine oxidase
MTSRDGYQWTPETGLTQGVPSLGVISPPTNIEDTDKDGPWDVIVIGGGYCGLTATRDLTVAGFKTLLLEARDRIGGRSWSSNIDGYPYEMGGTWVHWHQSHVWREITRYKMHNALSPSFNFSRGVNHFQLRTNPTTSTYMTHEAEAELLRSALHKFTNVDGTNGRTVLPFPHDMFYVPEFRKYDEMSYSERIDQIRDELSLNERSSLEAFILLCSGGTLENSSFGEFLHWWAMSGYTYQGCIDCLMSYKFKDGQSAFARRFWEEAAGTGRLGYVFGTPVRSVVNERDAVRVTARDGREFAAKRLVCTIPLNVLSSVHFSPPLSPQRMAAANIGHVNQCVKVHAEVSNKDMRSWSGISYPFNKLAYAIGDGTTPAGNTHIVCLGGAHNHIQPEEDVEATKMAVENMSPGNMDIKRLVFHNWCKDEFAKGAWFFAPPQLLSKSLDERRARHGNVLFANSDWALGWRGFIDGAIEEGTRAAVTVIEELRPAPAVRSHL

SEQ ID NO: 951 - DNA, 1485 bp, synthetic construct
  misc_feature 1..1485: note = Variant of monoamine oxidase
  source 1..1485: mol_type = other DNA
atgaccagccgcgacggctatcagtggaccccggaaacgggtctgacccagggcgtaccgtccctgggtgtcatttcgccgccgactaacatcgaagataccgataaggacgggccttgggatgtcattgtcattgggggcgggtattgtgggctgaccgcaacccgtgatttaaccgtcgcagggttcaagacgctgctgctggaggcccgtgatcgtattggtggccgctcctggagcagtaatattgacggttacccgtatgagatgggtggcacttgggttcattggcatcaatcgcacgtgtggcgtgaaatcacgcgttataaaatgcacaacgcgctgtctccatcatttaacttttcacgtggcgtgaatcacttccaactgcgtaccaatccgaccaccagtacgtacatgacgcacgaagcggaggatgaactgatgcgtagcgcattgcataaattcaccaatgtcgacggcactaatggccgtacagtgttgccgttcccacatgatatgttttatgtgccggaatttcgcaagtatgacgaaatgtcatattccgaacgcattgaccagatccgcgacgaactgtctttgaacgaacgctctagtttagaggctttcattttattatgtagcggtggcaccctggaaaactccagctttggtgaatttctgcattggtgggcaatgtcgggttacacgtatcagggctgtattgattgtttaatgtcctataaatttaaggatggccagagtgcgttcgcgcgtcgcttctgggaagaagccgctggcactggccgtctgggctatgtctttggttgcccggtgcgttctgtggtgaacgaacgcgacgcagtacgtgttaccgcacgtgacggtcgcgaattcgcagcgaaacgtttggtttgcacgattccgctgaacgtattgagttctgttcattttagcccaccactgtccccgcaacgcatggccgctgcgaacattggccatgttaaccagtgcgtcaaagtgcatgcggaagtcagttgcaaggatatgcgttcatggtcgggtatctcctatccgttcaacaaattagcctacgctatcggcgatggcacgaccccagcgggtaatacgcatattgtgtgccttgggggggcccataatcatatccagccggaagaggacgtggaagcaacgaagatggccgttgaaaacatgtcgcctgggaatatggatatcaaacgtctggtcttccacaactggtgcaaggatgaatttgccaaaggcgcgtggttcttcgcccctccacagctgctgtcaaagagcctggatgaacgtcgctgtcgtcacggtaatgtcctgtttgcaaactccgattgggccttaggttggcgtggttttatcgatggtgctatcgaggagggcacccgcgcagcggttactgtaattgaggaactgcgtcctgcgcctgcggtgcgttcccacctg

SEQ ID NO: 952 - protein, 495 aa, synthetic construct
  REGION 1..495: note = Variant of monoamine oxidase
MTSRDGYQWTPETGLTQGVPSLGVISPPTNIEDTDKDGPWDVIVIGGGYCGLTATRDLTVAGFKTLLLEARDRIGGRSWSSNIDGYPYEMGGTWVHWHQSHVWREITRYKMHNALSPSFNFSRGVNHFQLRTNPTTSTYMTHEAEDELMRSALHKFTNVDGTNGRTVLPFPHDMFYVPEFRKYDEMSYSERIDQIRDELSLNERSSLEAFILLCSGGTLENSSFGEFLHWWAMSGYTYQGCIDCLMSYKFKDGQSAFARRFWEEAAGTGRLGYVFGCPVRSVVNERDAVRVTARDGREFAAKRLVCTIPLNVLSSVHFSPPLSPQRMAAANIGHVNQCVKVHAEVSCKDMRSWSGISYPFNKLAYAIGDGTTPAGNTHIVCLGGAHNHIQPEEDVEATKMAVENMSPGNMDIKRLVFHNWCKDEFAKGAWFFAPPQLLSKSLDERRCRHGNVLFANSDWALGWRGFIDGAIEEGTRAAVTVIEELRPAPAVRSHL

SEQ ID NO: 953 - DNA, 1485 bp, synthetic construct
  misc_feature 1..1485: note = Variant of monoamine oxidase
  source 1..1485: mol_type = other DNA
atgaccagccgcgacggctatcagtggaccccggaaacgggtctgacccagggcgtaccgtccctgggtgtcatttcgccgccgactaacatcgaagataccgataaggacgggccttgggatgtcattgtcattgggggcgggtattgtgggctgaccgcaacccgtgatttaaccgtcgcagggttcaagacgctgctgctggaggcccgtgatcgtattggtggccgctcctggagcagtaatattgacggttacccgtatgagatgggtggcacttgggttcattggcatcaatctcacgtgtggcgtgaaatcacgcgttataaaatgcacaacgcgctgtctccatcatttaacttttcacgtggcgtgaatcacttccaactgcgtaccaatccgaccaccagtacgtacatgacgcacgaagcggaggatgaactgctgcgtagcgcattgcataaattcaccaatgtcgacggcactaatggccgtacagtgttgccgttcccacatgatatgttttatgtgccggaatttcgcaagtatgacgaaatgtcatattccgaacgcattgaccagatccgcgacgaactgtctttgaacgaacgctctagtttagaggctttcattttattatgtagcggtggcaccctggaaaactccagctttggtgaatttctgcattggtgggcaatgtcgggttacacgtatcagggctgtatggattgtttaatctcctataaatttaaggatggccagagtgcgttcgcgcgtcgcttctgggaagaagccgctggcactggccgtctgggctatgtctttggttgcccggtgcgttctgtggtgaacgaacgcgacgcagtacgtgttaccgcacgtgacggtcgcgaattcgcagcgaaacgtttggtttgcacgattccgctgaacgtattgagttctgttcattttagcccaccactgtccccgcaacgcatggccgctgcgaacattggccatgttaaccagtgcgtcaaagtgcatgcggaagtcagttgcaaggatatgcgttcatggtcgggtatctcctatccgttcaacaaattagcctacgctatcggcgatggcacgaccccagcgggtaatacgcatattgtgtgccttgggggggcccataatcatatccagccggaagaggacgtggaagcaacgaagatggccgttgaaaacatgtcgcctgggaatatggatatcaaacgtctggtcttccacaactggtgcaaggatgaatttgccaaaggcgcgtggttcttcgcccctccacagctgctgtcaaagagcctggatgaactgcgcgcacgtcacggtaatgtcctgtttgcaaactccgattgggccttaggttggcgtggttttatcgatggtgctatcgaggagggcacccgcgcagcggttactgtaattgaggaactgcgtcctgcgcctgcggtgcgttcccacctg

SEQ ID NO: 954 - protein, 495 aa, synthetic construct
  REGION 1..495: note = Variant of monoamine oxidase
MTSRDGYQWTPETGLTQGVPSLGVISPPTNIEDTDKDGPWDVIVIGGGYCGLTATRDLTVAGFKTLLLEARDRIGGRSWSSNIDGYPYEMGGTWVHWHQSHVWREITRYKMHNALSPSFNFSRGVNHFQLRTNPTTSTYMTHEAEDELLRSALHKFTNVDGTNGRTVLPFPHDMFYVPEFRKYDEMSYSERIDQIRDELSLNERSSLEAFILLCSGGTLENSSFGEFLHWWAMSGYTYQGCMDCLISYKFKDGQSAFARRFWEEAAGTGRLGYVFGCPVRSVVNERDAVRVTARDGREFAAKRLVCTIPLNVLSSVHFSPPLSPQRMAAANIGHVNQCVKVHAEVSCKDMRSWSGISYPFNKLAYAIGDGTTPAGNTHIVCLGGAHNHIQPEEDVEATKMAVENMSPGNMDIKRLVFHNWCKDEFAKGAWFFAPPQLLSKSLDELRARHGNVLFANSDWALGWRGFIDGAIEEGTRAAVTVIEELRPAPAVRSHL

SEQ ID NO: 955 - DNA, 1485 bp, synthetic construct
  misc_feature 1..1485: note = Variant of monoamine oxidase
  source 1..1485: mol_type = other DNA
atgaccagccgcgacggctatcagtggaccccggaaacgggtctgacccagggcgtaccgtccctgggtgtcatttcgccgccgactaacatcgaagataccgataaggacgggccttgggatgtcattgtcattgggggcgggtattgtgggctgaccgcaacccgtgatttaaccgtcgcagggttcaagacgctgctgctggaggcccgtgatcgtattggtggccgctcctggagcagtaatattgacggttacccgtatgagatgggtggcacttgggttcattggcatcaatcgcacgtgtggcgtgaaatcacgcgttataaaatgcacaacgcgctgtctccatcatttaacttttcacgtggcgtgaatcacttccaactgcgtaccaatccgaccaccagtacgtacatgacgcacgaagcggaggatgaactgctgcgtagcgcattgcataaattcaccaatgtcgacggcactaatggccgtacagtgttgccgttcccacatgatatgttttatgtgccggaatttcgcaagtatgacgaaatgtcatattccgaacgcattgaccagatccgcgacgatctgtctttgaacgaacgctctagtttagaggctttcattttattatgtagcggtggcaccctggaaaactccagctttggtgaatttctgcattggtgggcaatgtcgggttacacgtatcagggctgtattgattgtttaatttcctataaatttaaggatggccagagtgcgttcgcgcgtcgcttctgggaagaagccgctggcactggccgtctgggctatgtctttggttgcccggtgcgttctgtggtgaacgaacgcgacgcagtacgtgttaccgcacgtgacggtcgcgaattcgcagcgaaacgtttggtttgcacgattccgctgaacgtattgagttctgttcattttagcccaccactgtccccgcaacgcatggccgctgcgaacattggccatgttaaccagtgcgtcaaagtgcatgcggaagtcagttgcaaggatatgcgttcatggtcgggtatctcctatccgttcaacaaattagcctacgctatcggcgatggcacgaccccagcgggtaatacgcatattgtgtgccttgggggggcccataatcatatccagccggaagaggacgtggaagcaacgaagatggccgttgaaaacatgtcgcctgggaatatggatatcaaacgtctggtcttccacaactggtgcaaggatgaatttgccaaaggcgcgtggttcttcgcccctccacagctgctgtcaaagagcctggatgaactgcgctgtcgtcacggtaatgtcctgtttgcaaactccgattgggccttaggttggcgtggttttatcgatggtgctatcgaggagggcacccgcgcagcggttactgtaattgaggaactgcgtcctgcgcctgcggtgcgttcccacctg

SEQ ID NO: 956 - protein, 495 aa, synthetic construct
  REGION 1..495: note = Variant of monoamine oxidase
MTSRDGYQWTPETGLTQGVPSLGVISPPTNIEDTDKDGPWDVIVIGGGYCGLTATRDLTVAGFKTLLLEARDRIGGRSWSSNIDGYPYEMGGTWVHWHQSHVWREITRYKMHNALSPSFNFSRGVNHFQLRTNPTTSTYMTHEAEDELLRSALHKFTNVDGTNGRTVLPFPHDMFYVPEFRKYDEMSYSERIDQIRDDLSLNERSSLEAFILLCSGGTLENSSFGEFLHWWAMSGYTYQGCIDCLISYKFKDGQSAFARRFWEEAAGTGRLGYVFGCPVRSVVNERDAVRVTARDGREFAAKRLVCTIPLNVLSSVHFSPPLSPQRMAAANIGHVNQCVKVHAEVSCKDMRSWSGISYPFNKLAYAIGDGTTPAGNTHIVCLGGAHNHIQPEEDVEATKMAVENMSPGNMDIKRLVFHNWCKDEFAKGAWFFAPPQLLSKSLDELRCRHGNVLFANSDWALGWRGFIDGAIEEGTRAAVTVIEELRPAPAVRSHL

SEQ ID NO: 957 - DNA, 1485 bp, synthetic construct
  misc_feature 1..1485: note = Variant of monoamine oxidase
  source 1..1485: mol_type = other DNA
atgaccagccgcgacggctatcagtggaccccggaaacgggtctgacccagggcgtaccgtccctgggtgtcatttcgccgccgactaacatcgaagataccgataaggacgggccttgggatgtcattgtcattgggggcgggtattgtgggctgaccgcaacccgtgatttaaccgtcgcagggttcaagacgctgctgctggaggcccgtgatcgtattggtggccgctcctggagcagtaatattgacggttacccgtatgagatgggtggcacttgggttcattggcatcaatcgcacgtgtggcgtgaaatcacgcgttataaaatgcacaacgcgctgtctccatcatttaacttttcacgtggcgtgaatcacttccaactgcgtaccaatccgaccaccagtacgtacatgacgcacgaagcggaggatgaactgatgcgtagcgcattgcataaattcaccaatgtcgacggcactaatggccgtacagtgttgccgttcccacatgatatgttttatgtgccggaatttcgcaagtatgacgaaatgtcatattccgaacgcattgaccagatccgcgacgatctgtctttgaacgaacgctctagtttagaggctttcattttattatgtagcggtggcaccctggaaaactccagctttggtgaatttctgcattggtgggcaatgtcgggttacacgtatcagggctgtatggattgtttaatctcctataaatttaaggatggccagagtgcgttcgcgcgtcgcttctgggaagaagccgctggcactggccgtctgggctatgtctttggttgtccggtgcgttctgtggtgaacgaacgcgacgcagtacgtgttaccgcacgtgacggtcgcgaattcgcagcgaaacgtttggtttgcacgattccgctgaacgtattgagttctgttcattttagcccaccactgtccccgcaacgcatggccgctgcgaacattggccatgttaaccagtgcgtcaaagtgcatgcggaagtcagttgtccggatatgcgttcatggtcgggtatctcctatccgttcaacaaattagcctacgctatcggcgatggcacgaccccagcgggtaatacgcatattgtgtgccttgggggggcccataatcatatccagccggaagaggacgtggaagcaacgaagatggccgttgaaaacatgtcgcctgggaatatggatatcaaacgtctggtcttccacaactggtgcaaggatgaatttgccaaaggcgcgtggttcttcgcccctccacagctgctgtcaaagagcctggatgaacgtcgctgtcgtcacggtaatgtcctgtttgcaaactccgattgggccttaggttggcgtggttttatcgatggtgctatcgaggagggcacccgcgcagcggttactgtaattgaggaactgcgtcctgcgcctgcggtgcgttcccacctg

SEQ ID NO: 958 - protein, 495 aa, synthetic construct
  REGION 1..495: note = Variant of monoamine oxidase
MTSRDGYQWTPETGLTQGVPSLGVISPPTNIEDTDKDGPWDVIVIGGGYCGLTATRDLTVAGFKTLLLEARDRIGGRSWSSNIDGYPYEMGGTWVHWHQSHVWREITRYKMHNALSPSFNFSRGVNHFQLRTNPTTSTYMTHEAEDELMRSALHKFTNVDGTNGRTVLPFPHDMFYVPEFRKYDEMSYSERIDQIRDDLSLNERSSLEAFILLCSGGTLENSSFGEFLHWWAMSGYTYQGCMDCLISYKFKDGQSAFARRFWEEAAGTGRLGYVFGCPVRSVVNERDAVRVTARDGREFAAKRLVCTIPLNVLSSVHFSPPLSPQRMAAANIGHVNQCVKVHAEVSCPDMRSWSGISYPFNKLAYAIGDGTTPAGNTHIVCLGGAHNHIQPEEDVEATKMAVENMSPGNMDIKRLVFHNWCKDEFAKGAWFFAPPQLLSKSLDERRCRHGNVLFANSDWALGWRGFIDGAIEEGTRAAVTVIEELRPAPAVRSHL

SEQ ID NO: 959 - DNA, 1485 bp, synthetic construct
  misc_feature 1..1485: note = Variant of monoamine oxidase
  source 1..1485: mol_type = other DNA
atgaccagccgcgacggctatcagtggaccccggaaacgggtctgacccagggcgtaccgtccctgggtgtcatttcgccgccgactaacatcgaagataccgataaggacgggccttgggatgtcattgtcattgggggcgggtattgtgggctgaccgcaacccgtgatttaaccgtcgcagggttcaagacgctgctgctggaggcccgtgatcgtattggtggccgctcctggagcagtaatattgacggttacccgtatgagatgggtggcacttgggttcattggcatcaaccgcacgtgtggcgtgaaatcacgcgttataaaatgcacaacgcgctgtctccatcatttaacttttcacgtggcgtgaatcacttccaactgcgtaccaatccgaccaccagtacgtacatgacgcacgaagcgggggatgaactgctgcgtagcgcattgcataaattcaccaatgtcgacggcactaatggccgtacagtgttgccgttcccacatgatatgttttatgtgccggaatttcgcaagtatgacgaaatgtcatattccgaacgcattgaccagatccgcgacgaactgtctttgaacgaacgctctagtttagaggctttcattttattatgtagcggtggcaccctggaaaactccagctttggtgaatttctgcattggtgggcaatgtcgggttacacgtatcagggctgtattgattgtttaatgtcctataaatttaaggatggccagagtgcgttcgcgcgtcgcttctgggaagaagccgctggcactggccgtctgggctatgtctttggtactccggtgcgttctgtggtgaacgaacgcgacgcagtacgtgttaccgcacgtgacggtcgcgaattcgcagcgaaacgtttggtttgcacgattccgctgaacgtattgagttctgttcattttagcccaccactgtccccgcaacgcatggccgctgcgaacattggccatgttaaccagtgcgtcaaagtgcatgcggaagtcagttgtccggatatgcgttcatggtcgggtatctcctatccgttcaacaaattagcctacgctatcggcgatggcacgaccccagcgggtaatacgcatattgtgtgccttgggggggcccataatcatatccagccggaagaggacgtggaagcaacgaagatggccgttgaaaacatgtcgcctgggaatatggatatcaaacgtctggtcttccacaactggtgcaaggatgaatttgccaaaggcgcgtggttcttcgcccctccacagctgctgtcaaagagcctggatgaacgtcgcgcacgtcacggtaatgtcctgtttgcaaactccgattgggccttaggttggcgtggttttatcgatggtgctatcgaggagggcacccgcgcagcggttactgtaattgaggaactgcgtcctgcgcctgcggtgcgttcccacctg

SEQ ID NO: 960 - protein, 495 aa, synthetic construct
  REGION 1..495: note = Variant of monoamine oxidase
MTSRDGYQWTPETGLTQGVPSLGVISPPTNIEDTDKDGPWDVIVIGGGYCGLTATRDLTVAGFKTLLLEARDRIGGRSWSSNIDGYPYEMGGTWVHWHQPHVWREITRYKMHNALSPSFNFSRGVNHFQLRTNPTTSTYMTHEAGDELLRSALHKFTNVDGTNGRTVLPFPHDMFYVPEFRKYDEMSYSERIDQIRDELSLNERSSLEAFILLCSGGTLENSSFGEFLHWWAMSGYTYQGCIDCLMSYKFKDGQSAFARRFWEEAAGTGRLGYVFGTPVRSVVNERDAVRVTARDGREFAAKRLVCTIPLNVLSSVHFSPPLSPQRMAAANIGHVNQCVKVHAEVSCPDMRSWSGISYPFNKLAYAIGDGTTPAGNTHIVCLGGAHNHIQPEEDVEATKMAVENMSPGNMDIKRLVFHNWCKDEFAKGAWFFAPPQLLSKSLDERRARHGNVLFANSDWALGWRGFIDGAIEEGTRAAVTVIEELRPAPAVRSHL

SEQ ID NO: 961 - DNA, 1485 bp, synthetic construct
  misc_feature 1..1485: note = Variant of monoamine oxidase
  source 1..1485: mol_type = other DNA
atgaccagccgcgacggctatcagtggaccccggaaacgggtctgacccagggcgtaccgtccctgggtgtcatttcgccgccgactaacatcgaagataccgataaggacgggccttgggatgtcattgtcattgggggcgggtattgtgggctgaccgcaacccgtgatttaaccgtcgcagggttcaagacgctgctgctggaggcccgtgatcgtattggtggccgctcctggagcagtaatattgacggttacccgtatgagatgggtggcacttgggttcattggcatcaatcgcacgtgtggcgtgaaatcacgcgttataaaatgcacaacgcgctgtctccatcatttaacttttcacgtggcgtgaatcacttccaactgcgtaccaatccgaccaccagtacgtacatgacgcacgaagcggaggatgaactgatgcgtagcgcattgcataaattcaccaatgtcgacggcactaatggccgtacagtgttgccgttcccacatgatatgttttatgtgccggaatttcgcaagtatgacgaaatgtcatattccgaacgcattgaccagatccgcgacgaactgtctttgaacgaacgctctagtttagaggctttcattttattatgtagcggtggcaccctggaaaactccagctttggtgaatttctgcattggtgggcaatgtcgggttacacgtatcagggctgtatggattgtttaatctcctataaatttaaggatggccagagtgcgttcgcgcgtcgcttctgggaagaagccgctggcactggccgtctgggctatgtctttggttgtccggtgcgttctgtggtgaacgaacgcgacgcagtacgtgttaccgcacgtgacggtcgcgaattcgcagcgaaacgtttggtttgcacgattccgctgaacgtattgagttctgttcattttagcccaccactgtccccgcaacgcatggccgctgcgaacattggccatgttaaccagtgcgtcaaagtgcatgcggaagtcagttgtccggatatgcgttcatggtcgggtatctcctatccgttcaacaaattagcctacgctatcggcgatggcacgaccccagcgggtaatacgcatattgtgtgccttgggggggcccataatcatatccagccggaagaggacgtggaagcaacgaagatggccgttgaaaacatgtcgcctgggaatatggatatcaaacgtctggtcttccacaactggtgcaaggatgaatttgccaaaggcgcgtggttcttcgcccctccacagctgctgtcaaagagcctggatgaacgtcgctgtcgtcacggtaatgtcctgtttgcaaactccgattgggccttaggttggcgtggttttatcgatggtgctatcgaggagggcacccgcgcagcggttactgtaattgaggaactgcgtcctgcgcctgcggtgcgttcccacctg

SEQ ID NO: 962 - protein, 495 aa, synthetic construct
  REGION 1..495: note = Variant of monoamine oxidase
MTSRDGYQWTPETGLTQGVPSLGVISPPTNIEDTDKDGPWDVIVIGGGYCGLTATRDLTVAGFKTLLLEARDRIGGRSWSSNIDGYPYEMGGTWVHWHQSHVWREITRYKMHNALSPSFNFSRGVNHFQLRTNPTTSTYMTHEAEDELMRSALHKFTNVDGTNGRTVLPFPHDMFYVPEFRKYDEMSYSERIDQIRDELSLNERSSLEAFILLCSGGTLENSSFGEFLHWWAMSGYTYQGCMDCLISYKFKDGQSAFARRFWEEAAGTGRLGYVFGCPVRSVVNERDAVRVTARDGREFAAKRLVCTIPLNVLSSVHFSPPLSPQRMAAANIGHVNQCVKVHAEVSCPDMRSWSGISYPFNKLAYAIGDGTTPAGNTHIVCLGGAHNHIQPEEDVEATKMAVENMSPGNMDIKRLVFHNWCKDEFAKGAWFFAPPQLLSKSLDERRCRHGNVLFANSDWALGWRGFIDGAIEEGTRAAVTVIEELRPAPAVRSHL

SEQ ID NO: 963 - DNA, 1485 bp, synthetic construct
  misc_feature 1..1485: note = Variant of monoamine oxidase
  source 1..1485: mol_type = other DNA
atgaccagccgcgacggctatcagtggaccccggaaacgggtctgacccagggcgtaccgtccctgggtgtcatttcgccgccgactaacatcgaagataccgataaggacgggccttgggatgtcattgtcattgggggcgggtattgtgggctgaccgcaacccgtgatttaaccgtcgcagggttcaagacgctgctgctggaggcccgtgatcgtattggtggccgctcctggagcagtaatattgacggttacccgtatgagatgggtggcacttgggttcattggcatcaatcgcacgtgtggcgtgaaatcacgcgttataaaatgcacaacgcgctgtctccatcatttaacttttcacgtggcgtgaatcacttccaactgcgtaccaatccgaccaccagtacgtacatgacgcacgaagcgggggatgaactgctgcgtagcgcattgcataaattcaccaatgtcgacggcactaatggccgtacagtgttgccgttcccacatgatatgttttatgtgccggaatttcgcaagtatgacgaaatgtcatattccgaacgcattgaccagatccgcgacgaactgtctttgaacgaacgctctagtttagaggctttcattttattatgtagcggtggcaccctggaaaactccagctttggtgaatttctgcattggtgggcaatgtcgggttacacgtatcagggctgtatggattgtttaatttcctataaatttaaggatggccagagtgcgttcgcgcgtcgcttctgggaagaagccgctggcactggccgtctgggctatgtctttggtactccggtgcgttctgtggtgaacgaacgcgacgcagtacgtgttaccgcacgtgacggtcgcgaattcgcagcgaaacgtttggtttgcacgattccgctgaacgtattgagttctgttcattttagcccaccactgtccccgcaacgcatggccgctgcgaacattggccatgttaaccagtgcgtcaaagtgcatgcggaagtcagtaacccagatatgcgttcatggtcgggtatctcctatccgttcaacaaattagcctacgctatcggcgatggcacgaccccagcgggtaatacgcatattgtgtgccttgggggggcccataatcatatccagccggaagaggacgtggaagcaacgaagatggccgttgaaaacatgtcgcctgggaatatggatatcaaacgtctggtcttccacaactggtgcaaggatgaatttgccaaaggcgcgtggttcttcgcccctccacagctgctgtcaaagagcctggatgaacgtcgctgtcgtcacggtaatgtcctgtttgcaaactccgattgggccttaggttggcgtggttttatcgatggtgctatcgaggagggcacccgcgcagcggttactgtaattgaggaactgcgtcctgcgcctgcggtgcgttcccacctg

SEQ ID NO: 964 - protein, 495 aa, synthetic construct
  REGION 1..495: note = Variant of monoamine oxidase
MTSRDGYQWTPETGLTQGVPSLGVISPPTNIEDTDKDGPWDVIVIGGGYCGLTATRDLTVAGFKTLLLEARDRIGGRSWSSNIDGYPYEMGGTWVHWHQSHVWREITRYKMHNALSPSFNFSRGVNHFQLRTNPTTSTYMTHEAGDELLRSALHKFTNVDGTNGRTVLPFPHDMFYVPEFRKYDEMSYSERIDQIRDELSLNERSSLEAFILLCSGGTLENSSFGEFLHWWAMSGYTYQGCMDCLISYKFKDGQSAFARRFWEEAAGTGRLGYVFGTPVRSVVNERDAVRVTARDGREFAAKRLVCTIPLNVLSSVHFSPPLSPQRMAAANIGHVNQCVKVHAEVSNPDMRSWSGISYPFNKLAYAIGDGTTPAGNTHIVCLGGAHNHIQPEEDVEATKMAVENMSPGNMDIKRLVFHNWCKDEFAKGAWFFAPPQLLSKSLDERRCRHGNVLFANSDWALGWRGFIDGAIEEGTRAAVTVIEELRPAPAVRSHL

SEQ ID NO: 965 - DNA, 1485 bp, synthetic construct
  misc_feature 1..1485: note = Variant of monoamine oxidase
  source 1..1485: mol_type = other DNA
atgaccagccgcgacggctatcagtggaccccggaaacgggtctgacccagggcgtaccgtccctgggtgtcatttcgccgccgactaacatcgaagataccgataaggacgggccttgggatgtcattgtcattgggggcgggtattgtgggctgaccgcaacccgtgatttaaccgtcgcagggttcaagacgctgctgctggaggcccgtgatcgtattggtggccgctcctggagcagtaatattgacggttacccgtatgagatgggtggcacttgggttcattggcatcaaccgcacgtgtggcgtgaaatcacgcgttataaaatgcacaacgcgctgtctccatcatttaacttttcacgtggcgtgaatcacttccaactgcgtaccaatccgaccaccagtacgtacatgacgcacgaagcggaggatgaactgatgcgtagcgcattgcataaattcaccaatgtcgacggcactaatggccgtacagtgttgccgttcccacatgatatgttttatgtgccggaatttcgcaagtatgacgaaatgtcatattccgaacgcattgaccagatccgcgacgaactgtctttgaacgaacgctctagtttagaggctttcattttattatgtagcggtggcaccctggaaaactccagctttggtgaatttctgcattggtgggcaatgtcgggttacacgtatcagggctgtattgattgtttaatgtcctataaatttaaggatggccagagtgcgttcgcgcgtcgcttctgggaagaagccgctggcactggccgtctgggctatgtctttggtactccggtgcgttctgtggtgaacgaacgcgacgcagtacgtgttaccgcacgtgacggtcgcgaattcgcagcgaaacgtttggtttgcacgattccgctgaacgtattgagttctgttcattttagcccaccactgtccccgcaacgcatggccgctgcgaacattggccatgttaaccagtgcgtcaaagtgcatgcggaagtcagtaacaaggatatgcgttcatggtcgggtatctcctatccgttcaacaaattagcctacgctatcggcgatggcacgaccccagcgggtaatacgcatattgtgtgccttgggggggcccataatcatatccagccggaagaggacgtggaagcaacgaagatggccgttgaaaacatgtcgcctgggaatatggatatcaaacgtctggtcttccacaactggtgcaaggatgaatttgccaaaggcgcgtggttcttcgcccctccacagctgctgtcaaagagcctggatgaactgcgcgcacgtcacggtaatgtcctgtttgcaaactccgattgggccttaggttggcgtggttttatcgatggtgctatcgaggagggcacccgcgcagcggttactgtaattgaggaactgcgtcctgcgcctgcggtgcgttcccacctg

SEQ ID NO: 966 - protein, 495 aa, synthetic construct
  REGION 1..495: note = Variant of monoamine oxidase
MTSRDGYQWTPETGLTQGVPSLGVISPPTNIEDTDKDGPWDVIVIGGGYCGLTATRDLTVAGFKTLLLEARDRIGGRSWSSNIDGYPYEMGGTWVHWHQPHVWREITRYKMHNALSPSFNFSRGVNHFQLRTNPTTSTYMTHEAEDELMRSALHKFTNVDGTNGRTVLPFPHDMFYVPEFRKYDEMSYSERIDQIRDELSLNERSSLEAFILLCSGGTLENSSFGEFLHWWAMSGYTYQGCIDCLMSYKFKDGQSAFARRFWEEAAGTGRLGYVFGTPVRSVVNERDAVRVTARDGREFAAKRLVCTIPLNVLSSVHFSPPLSPQRMAAANIGHVNQCVKVHAEVSNKDMRSWSGISYPFNKLAYAIGDGTTPAGNTHIVCLGGAHNHIQPEEDVEATKMAVENMSPGNMDIKRLVFHNWCKDEFAKGAWFFAPPQLLSKSLDELRARHGNVLFANSDWALGWRGFIDGAIEEGTRAAVTVIEELRPAPAVRSHL

SEQ ID NO: 967 - DNA, 1485 bp, synthetic construct
  misc_feature 1..1485: note = Variant of monoamine oxidase
  source 1..1485: mol_type = other DNA
atgaccagccgcgacggctatcagtggaccccggaaacgggtctgacccagggcgtaccgtccctgggtgtcatttcgccgccgactaacatcgaagataccgataaggacgggccttgggatgtcattgtcattgggggcgggtattgtgggctgaccgcaacccgtgatttaaccgtcgcagggttcaagacgctgctgctggaggcccgtgatcgtattggtggccgctcctggagcagtaatattgacggttacccgtatgagatgggtggcacttgggttcattggcatcaatcgcacgtgtggcgtgaaatcacgcgttataaaatgcacaacgcgctgtctccatcatttaacttttcacgtggcgtgaatcacttccaactgcgtaccaatccgaccaccagtacgtacatgacgcacgaagcgggggctgaactgctgcgtagcgcattgcataaattcaccaatgtcgacggcactaatggccgtacagtgttgccgttcccacatgatatgttttatgtgccggaatttcgcaagtatgacgaaatgtcatattccgaacgcattgaccagatccgcgacgaactgtctttgaacgaacgctctagtttagaggctttcattttattatgtagcggtggcaccctggaaaactccagctttggtgaatttctgcattggtgggcaatgtcgggttacacgtatcagggctgtatggattgtttaatttcctataaatttaaggatggccagagtgcgttcgcgcgtcgcttctgggaagaagccgctggcactggccgtctgggctatgtctttggttgcccggtgcgttctgtggtgaacgaacgcgacgcagtacgtgttaccgcacgtgacggtcgcgaattcgcagcgaaacgtttggtttgcacgattccgctgaacgtattgagttctgttcattttagcccaccactgtccccgcaacgcatggccgctgcgaacattggccatgttaaccagtgcgtcaaagtgcatgcggaagtcagtgacccagatatgcgttcatggtcgggtatctcctatccgttcaacaaattagcctacgctatcggcgatggcacgaccccagcgggtaatacgcatattgtgtgccttgggggggcccataatcatatccagccggaagaggacgtggaagcaacgaagatggccgttgaaaacatgtcgcctgggaatatggatatcaaacgtctggtcttccacaactggtgcaaggatgaatttgccaaaggcgcgtggttcttcgcccctccacagctgctgtcaaagagcctggatgaactgcgcgcacgtcacggtaatgtcctgtttgcaaactccgattgggccttaggttggcgtggttttatcgatggtgctatcgaggagggcacccgcgcagcggttactgtaattgaggaactgcgtcctgcgcctgcggtgcgttcccacctg

SEQ ID NO: 968 - protein, 495 aa, synthetic construct
  REGION 1..495: note = Variant of monoamine oxidase
MTSRDGYQWTPETGLTQGVPSLGVISPPTNIEDTDKDGPWDVIVIGGGYCGLTATRDLTVAGFKTLLLEARDRIGGRSWSSNIDGYPYEMGGTWVHWHQSHVWREITRYKMHNALSPSFNFSRGVNHFQLRTNPTTSTYMTHEAGAELLRSALHKFTNVDGTNGRTVLPFPHDMFYVPEFRKYDEMSYSERIDQIRDELSLNERSSLEAFILLCSGGTLENSSFGEFLHWWAMSGYTYQGCMDCLISYKFKDGQSAFARRFWEEAAGTGRLGYVFGCPVRSVVNERDAVRVTARDGREFAAKRLVCTIPLNVLSSVHFSPPLSPQRMAAANIGHVNQCVKVHAEVSDPDMRSWSGISYPFNKLAYAIGDGTTPAGNTHIVCLGGAHNHIQPEEDVEATKMAVENMSPGNMDIKRLVFHNWCKDEFAKGAWFFAPPQLLSKSLDELRARHGNVLFANSDWALGWRGFIDGAIEEGTRAAVTVIEELRPAPAVRSHL

SEQ ID NO: 969 - DNA, 1485 bp, synthetic construct
  misc_feature 1..1485: note = Variant of monoamine oxidase
  source 1..1485: mol_type = other DNA
atgaccagccgcgacggctatcagtggaccccggaaacgggtctgacccagggcgtaccgtccctgggtgtcatttcgccgccgactaacatcgaagataccgataaggacgggccttgggatgtcattgtcattgggggcgggtattgtgggctgaccgcaacccgtgatttaaccgtcgcagggttcaagacgctgctgctggaggcccgtgatcgtattggtggccgctcctggagcagtaatattgacggttacccgtatgagatgggtggcacttgggttcattggcatcaatcgcacgtgtggcgtgaaatcacgcgttataaaatgcacaacgcgctgtctccatcatttaacttttcacgtggcgtgaatcacttccaactgcgtaccaatccgaccaccagtacgtacatgacgcacgaagcggaggatgaactgctgcgtagcgcattgcataaattcaccaatgtcgacggcactaatggccgtacagtgttgccgttcccacatgatatgttttatgtgccggaatttcgcaagtatgacgaaatgtcatattccgaacgcattgaccagatccgcgacgaactgtctttgaacgaacgctctagtttagaggctttcattttattatgtagcggtggcaccctggaaaactccagctttggtgaatttctgcattggtgggcaatgtcgggttacacgtatcagggctgtatggattgtttaatctcctataaatttaaggatggccagagtgcgttcgcgcgtcgcttctgggaagaagccgctggcactggccgtctgggctatgtctttggttgtccggtgcgttctgtggtgaacgaacgcgacgcagtacgtgttaccgcacgtgacggtcgcgaattcgcagcgaaacgtttggtttgcacgattccgctgaacgtattgagttctgttcattttagcccaccactgtccccgcaacgcatggccgctgcgaacattggccatgttaaccagtgcgtcaaagtgcatgcggaagtcagttgcaaggatatgcgttcatggtcgggtatctcctatccgttcaacaaattagcctacgctatcggcgatggcacgaccccagcgggtaatacgcatattgtgtgccttgggggggcccataatcatatccagccggaagaggacgtggaagcaacgaagatggccgttgaaaacatgtcgcctgggaatatggatatcaaacgtctggtcttccacaactggtgcaaggatgaatttgccaaaggcgcgtggttcttcgcccctccacagctgctgtcaaagagcctggatgaactgcgctgtcgtcacggtaatgtcctgtttgcaaactccgattgggccttaggttggcgtggttttatcgatggtgctatcgaggagggcacccgcgcagcggttactgtaattgaggaactgcgtcctgcgcctgcggtgcgttcccacctg

SEQ ID NO: 970 - protein, 495 aa, synthetic construct
  REGION 1..495: note = Variant of monoamine oxidase
MTSRDGYQWTPETGLTQGVPSLGVISPPTNIEDTDKDGPWDVIVIGGGYCGLTATRDLTVAGFKTLLLEARDRIGGRSWSSNIDGYPYEMGGTWVHWHQSHVWREITRYKMHNALSPSFNFSRGVNHFQLRTNPTTSTYMTHEAEDELLRSALHKFTNVDGTNGRTVLPFPHDMFYVPEFRKYDEMSYSERIDQIRDELSLNERSSLEAFILLCSGGTLENSSFGEFLHWWAMSGYTYQGCMDCLISYKFKDGQSAFARRFWEEAAGTGRLGYVFGCPVRSVVNERDAVRVTARDGREFAAKRLVCTIPLNVLSSVHFSPPLSPQRMAAANIGHVNQCVKVHAEVSCKDMRSWSGISYPFNKLAYAIGDGTTPAGNTHIVCLGGAHNHIQPEEDVEATKMAVENMSPGNMDIKRLVFHNWCKDEFAKGAWFFAPPQLLSKSLDELRCRHGNVLFANSDWALGWRGFIDGAIEEGTRAAVTVIEELRPAPAVRSHL

SEQ ID NO: 971 - DNA, 1485 bp, synthetic construct
  misc_feature 1..1485: note = Variant of monoamine oxidase
  source 1..1485: mol_type = other DNA
atgaccagccgcgacggctatcagtggaccccggaaacgggtctgacccagggcgtaccgtccctgggtgtcatttcgccgccgactaacatcgaagataccgataaggacgggccttgggatgtcattgtcattgggggcgggtattgtgggctgaccgcaacccgtgatttaaccgtcgcagggttcaagacgctgctgctggaggcccgtgatcgtattggtggccgctcctggagcagtaatattgacggttacccgtatgagatgggtggcacttgggttcattggcatcaaccgcacgtgtggcgtgaaatcacgcgttataaaatgcacaacgcgctgtctccatcatttaacttttcacgtggcgtgaatcacttccaactgcgtaccaatccgaccaccagtacgtacatgacgcacgaagcgggggatgaactgctgcgtagcgcattgcataaattcaccaatgtcgacggcactaatggccgtacagtgttgccgttcccacatgatatgttttatgtgccggaatttcgcaagtatgacgaaatgtcatattccgaacgcattgaccagatccgcgacgaactgtctttgaacgaacgcactagtttagaggctttcattttattatgtagcggtggcaccctggaaaactccagctttggtgaatttctgcattggtgggcaatgtcgggttacacgtatcagggctgtatggattgtttaatgtcctataaatttaaggatggccagagtgcgttcgcgcgtcgcttctgggaagaagccgctggcactggccgtctgggctatgtctttggtactccggtgcgttctgtggtgaacgaacgcgacgcagtacgtgttaccgcacgtgacggtcgcgaattcgcagcgaaacgtttggtttgcacgattccgctgaacgtattgagttctgttcattttagcccaccactgtccccgcaacgcatggccgctgcgaacattggccatgttaaccagtgcgtcaaagtgcatgcggaagtcagttgcaaggatatgcgttcatggtcgggtatctcctatccgttcaacaaattagcctacgctatcggcgatggcacgaccccagcgggtaatacgcatattgtgtgccttgggggggcccataatcatatccagccggaagaggacgtggaagcaacgaagatggccgttgaaaacatgtcgcctgggaatatggatatcaaacgtctggtcttccacaactggtgcaaggatgaatttgccaaaggcgcgtggttcttcgcccctccacagctgctgtcaaagagcctggatgaacgtcgctgtcgtcacggtaatgtcctgtttgcaaactccgattgggccttaggttggcgtggttttatcgatggtgctatcgaggagggcacccgcgcagcggttactgtaattgaggaactgcgtcctgcgcctgcggtgcgttcccacctg

SEQ ID NO: 972 - protein, 495 aa, synthetic construct
  REGION 1..495: note = Variant of monoamine oxidase
MTSRDGYQWTPETGLTQGVPSLGVISPPTNIEDTDKDGPWDVIVIGGGYCGLTATRDLTVAGFKTLLLEARDRIGGRSWSSNIDGYPYEMGGTWVHWHQPHVWREITRYKMHNALSPSFNFSRGVNHFQLRTNPTTSTYMTHEAGDELLRSALHKFTNVDGTNGRTVLPFPHDMFYVPEFRKYDEMSYSERIDQIRDELSLNERTSLEAFILLCSGGTLENSSFGEFLHWWAMSGYTYQGCMDCLMSYKFKDGQSAFARRFWEEAAGTGRLGYVFGTPVRSVVNERDAVRVTARDGREFAAKRLVCTIPLNVLSSVHFSPPLSPQRMAAANIGHVNQCVKVHAEVSCKDMRSWSGISYPFNKLAYAIGDGTTPAGNTHIVCLGGAHNHIQPEEDVEATKMAVENMSPGNMDIKRLVFHNWCKDEFAKGAWFFAPPQLLSKSLDERRCRHGNVLFANSDWALGWRGFIDGAIEEGTRAAVTVIEELRPAPAVRSHL

SEQ ID NO: 973 - DNA, 1485 bp, synthetic construct
  misc_feature 1..1485: note = Variant of monoamine oxidase
  source 1..1485: mol_type = other DNA
atgaccagccgcgacggctatcagtggaccccggaaacgggtctgacccagggcgtaccgtccctgggtgtcatttcgccgccgactaacatcgaagataccgataaggacgggccttgggatgtcattgtcattgggggcgggtattgtgggctgaccgcaacccgtgatttaaccgtcgcagggttcaagacgctgctgctggaggcccgtgatcgtattggtggccgctcctggagcagttttattgacggttacccgtatgagatgggtggcacttgggttcattggcatcaatctcacgtgtggcgtgaaatcacgcgttataaaatgcacaacgcgctgtctccgtcatttaacttttcacgtggcgtgaatcacttccaactgcgtaccaatccgaccaccagtacgtacatgacgcacgaagcggaggatgaactgctgcgtagcgcattgcataaattcaccaatgtcgacggcactaatggccgtacagtgttgccgttcccacatgatatgttttatgtgccggaatttcgcaagtatgacgaaatgtcatattccgaacgcattgaccagatccgcgacgaactgtctttgaacgaacgctctagtttagaggctttcattttattatgtagcggtggcaccctggaaaactccagctttggtgaatttctgcattggtgggcaatgtcgggttacacgtatcagggctgtatggattgtttaatctcctataaatttaaggatggccagagtgcgttcgcgcgtcgcttctgggaagaagccgctggcactggccgtctgggctatgtctttggttgtccggtgcgttctgtggtgaacgaacgcgacgcagtacgtgttaccgcacgtgacggtcgcgaattcgcagcgaaacgtttggtttgcacgattccgctgaacgtattgagttctgttcattttagcccaccactgtccccgcaacgcatggccgctgcgaacattggccatgttaaccagtgcgtcaaagtgcatgcggaagtcagttgtccggatatgcgttcatggtcgggtatctcctatccgttcaacaaattagcctacgctatcggcgatggcacgaccccagcgggtaatacgcatattgtgtgccttgggggggcccataatcatatccagccggaagaggacgtggaagcaacgaagatggccgttgaaaacatgtcgcctgggaatatggatatcaaacgtctggtcttccataactggtgcaaggatgaatttgccaaaggcgcgtggttcttcgcccctccacagctgctgtcaaagagcctggatgaactgcgctgccgtcacggtaatgtcctgtttgcaaactccgattgggccttaggttggcgtggttttatcgatggtgctatcgaggagggcacccgcgcagcggttactgtaattgaggaactgcgtcctgcgcctgcggtgcgttcccacctg

SEQ ID NO: 974 - protein, 495 aa, synthetic construct; identical to SEQ ID NO: 26
  REGION 1..495: note = Variant of monoamine oxidase

SEQ ID NO: 975 - DNA, 1485 bp, synthetic construct
  misc_feature 1..1485: note = Variant of monoamine oxidase
  source 1..1485: mol_type = other DNA
atgaccagccgcgacggctatcagtggaccccggaaacgggtctgacccagggcgtaccgtccctgggtgtcatttcgccgccgactaacatcgaagataccgataaggacgggccttgggatgtcattgtcattgggggcgggtattgtgggctgaccgcaacccgtgatttaaccgtcgcagggttcaagacgctgctgctggaggcccgtgatcgtattggtggccgctcctggagcagtaatattgacggttacccgtatgagatgggtggcacttgggttcattggcatcaaccgcacgtgtggcgtgaaatcacgcgttataaaatgcacaacgcgctgtctccatcatttaacttttcacgtggcgtgaatcacttccaactgcgtaccaatccgaccaccagtacgtacatgacgcacgaagcgtcggctgaactgatgcgtagcgcattgcttaaattcaccaatgtcgacggcactaatggccgtacagtgttgccgttcccacatgatatgttttatgtgccggaatttcgcaagtatgacgaaatgtcatattccgaacgcattgaccagatccgcgacgaactgtctttgaacgaacgctctagtttagaggctttcattttattatgtagcggtggcaccctggaaaactccagctttggtgaatttctgcattggtgggcaatgtcgggttacacgtatcagggctgtatggattgtttaatctcctataaatttaaggatggccagagtgcgttcgcgcgtcgcttctgggaagaagccgctggcactggccgtctgggctatgtctttggttgtccggtgcgttctgtggtgaacgaacgcgacgcagtacgtgttaccgcacgtgacggtcgcgaattcgcagcgaaacgtttggtttgcacgattccgctgaacgtattgagttctgttcattttagcccaccactgtccccgcaacgcatggccgctgcgaacattggccatgttaaccagtgcgtcaaagtgcatgcggaagtcagttgcaaggatatgcgttcatggtcgggtatctcctatccgttcaacaaattagcctacgctatcggcgatggcacgaccccagcgggtaatacgcatattgtgtgccttgggggggcccataatcatatccagccggaagaggacgtggaagcaacgaagatggccgttgaaaacatgtcgcctgggaatatggatatcaaacgtctggtcttccacaactggtgcaaggatgaatttgccaaaggcgcgtggttcttcgcccctccacagctgctgtcaaagagcctggatgaacgtcgctgtcgtcacggtaatgtcctgtttgcaaactccgattgggccttaggttggcgtggttttatcgatggtgctatcgaggagggcacccgcgcagcggttactgtaattgaggaactgcgtcctgcgcctgcggtgcgttcccacctg

SEQ ID NO: 976 - protein, 495 aa, synthetic construct
  REGION 1..495: note = Variant of monoamine oxidase
MTSRDGYQWTPETGLTQGVPSLGVISPPTNIEDTDKDGPWDVIVIGGGYCGLTATRDLTVAGFKTLLLEARDRIGGRSWSSNIDGYPYEMGGTWVHWHQPHVWREITRYKMHNALSPSFNFSRGVNHFQLRTNPTTSTYMTHEASAELMRSALLKFTNVDGTNGRTVLPFPHDMFYVPEFRKYDEMSYSERIDQIRDELSLNERSSLEAFILLCSGGTLENSSFGEFLHWWAMSGYTYQGCMDCLISYKFKDGQSAFARRFWEEAAGTGRLGYVFGCPVRSVVNERDAVRVTARDGREFAAKRLVCTIPLNVLSSVHFSPPLSPQRMAAANIGHVNQCVKVHAEVSCKDMRSWSGISYPFNKLAYAIGDGTTPAGNTHIVCLGGAHNHIQPEEDVEATKMAVENMSPGNMDIKRLVFHNWCKDEFAKGAWFFAPPQLLSKSLDERRCRHGNVLFANSDWALGWRGFIDGAIEEGTRAAVTVIEELRPAPAVRSHL

SEQ ID NO: 977 - DNA, 1485 bp, synthetic construct
  misc_feature 1..1485: note = Variant of monoamine oxidase
  source 1..1485: mol_type = other DNA
atgaccagccgcgacggctatcagtggaccccggaaacgggtctgacccagggcgtaccgtccctgggtgtcatttcgccgccgactaacatcgaagataccgataaggacgggccttgggatgtcattgtcattgggggcgggtattgtgggctgaccgcaacccgtgatttaaccgtcgcagggttcaagacgctgctgctggaggcccgtgatcgtattggtggccgctcctggagcagtaatattgacggttacccgtatgagatgggtggcacttgggttcattggcatcaatcgcacgtgtggcgtgaaatcacgcgttataaaatgcacaacgcgctgtctccatcatttaacttttcacgtggcgtgaatcacttccaactgcgtaccaatccgaccaccagtacgtacatgacgcacgaagcggaggatgaactgatgcgtagcgcattgcataaattcaccaatgtcgacggcactaatggccgtacagtgttgccgttcccacatgatatgttttatgtgccggaatttcgcaagtatgacgaaatgtcatattccgaacgcattgaccagatccgcgacgaactgtctttgaacgaacgctctagtttagaggctttcattttattatgtagcggtggcaccctggaaaactccagctttggtgaatttctgcattggtgggcaatgtcgggttacacgtatcagggctgtattgattgtttaatgtcctataaatttaaggatggccagagtgcgttcgcgcgtcgcttctgggaagaagccgctggcactggccgtctgggctatgtctttggttgtccggtgcgttctgtggtgaacgaacgcgacgcagtacgtgttaccgcacgtgacggtcgcgaattcgcagcgaaacgtttggtttgcacgattccgctgaacgtattgagttctgttcattttagcccaccactgtccccgcaacgcatggccgctgcgaacattggccatgttaaccagtgcgtcaaagtgcatgcggaagtcagttgcccagatatgcgttcatggtcgggtatctcctatccgttcaacaaattagcctacgctatcggcgatggcacgaccccagcgggtaatacgcatattgtgtgccttgggggggcccataatcatatccagccggaagaggacgtggaagcaacgaagatggccgttgaaaacatgtcgcctgggaatatggatatcaaacgtctggtcttccacaactggtgcaaggatgaatttgccaaaggcgcgtggttcttcgcccctccacagctgctgtcaaagagcctggatgaactgcgctgtcgtcacggtaatgtcctgtttgcaaactccgattgggccttaggttggcgtggttttatcgatggtgctatcgaggagggcacccgcgcagcggttactgtaattgaggaactgcgtcctgcgcctgcggtgcgttcccacctg

SEQ ID NO: 978 - protein, 495 aa, synthetic construct
  REGION 1..495: note = Variant of monoamine oxidase
MTSRDGYQWTPETGLTQGVPSLGVISPPTNIEDTDKDGPWDVIVIGGGYCGLTATRDLTVAGFKTLLLEARDRIGGRSWSSNIDGYPYEMGGTWVHWHQSHVWREITRYKMHNALSPSFNFSRGVNHFQLRTNPTTSTYMTHEAEDELMRSALHKFTNVDGTNGRTVLPFPHDMFYVPEFRKYDEMSYSERIDQIRDELSLNERSSLEAFILLCSGGTLENSSFGEFLHWWAMSGYTYQGCIDCLMSYKFKDGQSAFARRFWEEAAGTGRLGYVFGCPVRSVVNERDAVRVTARDGREFAAKRLVCTIPLNVLSSVHFSPPLSPQRMAAANIGHVNQCVKVHAEVSCPDMRSWSGISYPFNKLAYAIGDGTTPAGNTHIVCLGGAHNHIQPEEDVEATKMAVENMSPGNMDIKRLVFHNWCKDEFAKGAWFFAPPQLLSKSLDELRCRHGNVLFANSDWALGWRGFIDGAIEEGTRAAVTVIEELRPAPAVRSHL

SEQ ID NO: 979 - DNA, 1485 bp, synthetic construct
  misc_feature 1..1485: note = Variant of monoamine oxidase
  source 1..1485: mol_type = other DNA
atgaccagccgcgacggctatcagtggaccccggaaacgggtctgacccagggcgtaccgtccctgggtgtcatttcgccgccgactaacatcgaagataccgataaggacgggccttgggatgtcattgtcattgggggcgggtattgtgggctgaccgcaacccgtgatttaaccgtcgcagggttcaagacgctgctgctggaggcccgtgatcgtattggtggccgctcctggagcagtaatattgacggttacccgtatgagatgggtggcacttgggttcattggcatcaatctcacgtgtggcgtgaaatcacgcgttataaaatgcacaacgcgctgtctccatcatttaacttttcacgtggcgtgaatcacttccaactgcgtaccaatccgaccaccagtacgtacatgacgcacgaagcggaggatgaactgctgcgtagcgcattgcataaattcaccaatgtcgacggcactaatggccgtacagtgttgccgttcccacatgatatgttttatgtgccggaatttcgcaagtatgacgaaatgtcatattccgaacgcattgaccagatccgcgacgaactgtctttgaacgaacgctctagtttagaggctttcattttattatgtagcggtggcaccctggaaaactccagctttggtgaatttctgcattggtgggcaatgtcgggttacacgtatcagggctgtatggattgtttaatctcctataaatttaaggatggccagagtgcgttcgcgcgtcgcttctgggaagaagccgctggcactggccgtctgggctatgtctttggtactccggtgcgttctgtggtgaacgaacgcgacgcagtacgtgttaccgcacgtgacggtcgcgaattcgcagcgaaacgtttggtttgcacgattccgctgaacgtattgagttctgttcattttagcccaccactgtccccgcaacgcatggccgctgcgaacattggccatgttaaccagtgcgtcaaagtgcatgcggaagtcagtaacaaggatatgcgttcatggtcgggtatctcctatccgttcaacaaattagcctacgctatcggcgatggcacgaccccagcgggtaatacgcatattgtgtgccttgggggggcccataatcatatccagccggaagaggacgtggaagcaacgaagatggccgttgaaaacatgtcgcctgggaatatggatatcaaacgtctggtcttccacaactggtgcaaggatgaatttgccaaaggcgcgtggttcttcgcccctccacagctgctgtcaaagagcctggatgaacgtcgctgtcgtcacggtaatgtcctgtttgcaaactccgattgggccttaggttggcgtggttttatcgatggtgctatcgaggagggcacccgcgcagcggttactgtaattgaggaactgcgtcctgcgcctgcggtgcgttcccacctg

SEQ ID NO: 980 - protein, 495 aa, synthetic construct
  REGION 1..495: note = Variant of monoamine oxidase
MTSRDGYQWTPETGLTQGVPSLGVISPPTNIEDTDKDGPWDVIVIGGGYCGLTATRDLTVAGFKTLLLEARDRIGGRSWSSNIDGYPYEMGGTWVHWHQSHVWREITRYKMHNALSPSFNFSRGVNHFQLRTNPTTSTYMTHEAEDELLRSALHKFTNVDGTNGRTVLPFPHDMFYVPEFRKYDEMSYSERIDQIRDELSLNERSSLEAFILLCSGGTLENSSFGEFLHWWAMSGYTYQGCMDCLISYKFKDGQSAFARRFWEEAAGTGRLGYVFGTPVRSVVNERDAVRVTARDGREFAAKRLVCTIPLNVLSSVHFSPPLSPQRMAAANIGHVNQCVKVHAEVSNKDMRSWSGISYPFNKLAYAIGDGTTPAGNTHIVCLGGAHNHIQPEEDVEATKMAVENMSPGNMDIKRLVFHNWCKDEFAKGAWFFAPPQLLSKSLDERRCRHGNVLFANSDWALGWRGFIDGAIEEGTRAAVTVIEELRPAPAVRSHL

SEQ ID NO: 981 - DNA, 1485 bp, synthetic construct
  misc_feature 1..1485: note = Variant of monoamine oxidase
  source 1..1485: mol_type = other DNA
atgaccagccgcgacggctatcagtggaccccggaaacgggtctgacccagggcgtaccgtccctgggtgtcatttcgccgccgactaacatcgaagataccgataaggacgggccttgggatgtcattgtcattgggggcgggtattgtgggctgaccgcaacccgtgatttaaccgtcgcagggttcaagacgctgctgctggaggcccgtgatcgtattggtggccgctcctggagcagtaatattgacggttacccgtatgagatgggtggcacttgggttcattggcatcaatcgcacgtgtggcgtgaaatcacgcgttataaaatgcacaacgcgctgtctccatcatttaacttttcacgtggcgtgaatcacttccaactgcgtaccaatccgaccaccagtacgtacatgacgcacgaagcggaggatgaactgctgcgtagcgcattgcataaattcaccaatgtcgacggcactaatggccgtacagtgttgccgttcccacatgatatgttttatgtgccggaatttcgcaagtatgacgaaatgtcatattccgaacgcattgaccagatccgcgacgaactgtctttgaacgaacgctctagtttagaggctttcattttattatgtagcggtggcaccctggaaaactccagctttggtgaatttctgcattggtgggcaatgtcgggttacacgtatcagggctgtattgattgtttaatttcctataaatttaaggatggccagagtgcgttcgcgcgtcgcttctgggaagaagccgctggcactggccgtctgggctatgtctttggtactccggtgcgttctgtggtgaacgaacgcgacgcagtacgtgttaccgcacgtgacggtcgcgaattcgcagcgaaacgtttggtttgcacgattccgctgaacgtattgagttctgttcattttagcccaccactgtccccgcaacgcatggccgctgcgaacattggccatgttaaccagtgcgtcaaagtgcatgcggaagtcagtgacaaggatatgcgttcatggtcgggtatctcctatccgttcaacaaattagcctacgctatcggcgatggcacgaccccagcgggtaatacgcatattgtgtgccttgggggggcccataatcatatccagccggaagaggacgtggaagcaacgaagatggccgttgaaaacatgtcgcctgggaatatggatatcaaacgtctggtcttccacaactggtgcaaggatgaatttgccaaaggcgcgtggttcttcgcccctccacagctgctgtcaaagagcctggatgaactgcgctgtcgtcacggtaatgtcctgtttgcaaactccgattgggccttaggttggcgtggttttatcgatggtgctatcgaggagggcacccgcgcagcggttactgtaattgaggaactgcgtcctgcgcctgcggtgcgttcccacctg

SEQ ID NO: 982 - protein, 495 aa, synthetic construct
  REGION 1..495: note = Variant of monoamine oxidase
MTSRDGYQWTPETGLTQGVPSLGVISPPTNIEDTDKDGPWDVIVIGGGYCGLTATRDLTVAGFKTLLLEARDRIGGRSWSSNIDGYPYEMGGTWVHWHQSHVWREITRYKMHNALSPSFNFSRGVNHFQLRTNPTTSTYMTHEAEDELLRSALHKFTNVDGTNGRTVLPFPHDMFYVPEFRKYDEMSYSERIDQIRDELSLNERSSLEAFILLCSGGTLENSSFGEFLHWWAMSGYTYQGCIDCLISYKFKDGQSAFARRFWEEAAGTGRLGYVFGTPVRSVVNERDAVRVTARDGREFAAKRLVCTIPLNVLSSVHFSPPLSPQRMAAANIGHVNQCVKVHAEVSDKDMRSWSGISYPFNKLAYAIGDGTTPAGNTHIVCLGGAHNHIQPEEDVEATKMAVENMSPGNMDIKRLVFHNWCKDEFAKGAWFFAPPQLLSKSLDELRCRHGNVLFANSDWALGWRGFIDGAIEEGTRAAVTVIEELRPAPAVRSHL

SEQ ID NO: 983 - DNA, 1485 bp, synthetic construct
  misc_feature 1..1485: note = Variant of monoamine oxidase
  source 1..1485: mol_type = other DNA
atgaccagccgcgacggctatcagtggaccccggaaacgggtctgacccagggcgtaccgtccctgggtgtcatttcgccgccgactaacatcgaagataccgataaggacgggccttgggatgtcattgtcattgggggcgggtattgtgggctgaccgcaacccgtgatttaaccgtcgcagggttcaagacgctgctgctggaggcccgtgatcgtattggtggccgctccgccagcagtaatattgacggttacccgtatgagatgggtggcacttgggttcattggcatcaatctcacgtgtggcgtgaaatcacgcgttataaaatgcacaacgcgctgtctccatcatttaacttttcacgtggcgtgaatcacttccaactgcgtaccaatccgaccaccagtacgtacatgacgcacgaagcggaggatgaactgctgcgtagcgcattgcataaattcaccaatgtcgacggcactaatggccgtacagtgttgccgttcccacatgatatgttttatgtgccggaatttcgcaagtatgacgaaatgtcatattccgaacgcattgaccagatccgcgacgaactgtctttgaacgaacgctctagtttagaggctttcattttattatgtagcggtggcaccctggaaaactccagctttggtgaatttctgcattggtgggcaatgtcgggttacacgcgtcagggctgtatggattgtttaatctcctataaatttaaggatggccagagtgcgttcgcgcgtcgcttctgggaagaagccgctggcactggccgtctgggctatgtctttggttgtccggtgcgttctgtggtgaacgaacgcgacgcagtacgtgttaccgcacgtgacggtcgcgaattcgcagcgaaacgtttggtttgcacgattccgctgaacgtattgagttctgttcattttagcccaccactgtccccgcaacgcatggccgctgcgaacatcggccatgttaaccagtgcgtcaaagtgcatgcggaagtcagttgtccggatatgcgttcatggtcgggtatctcctatccgttcaacaaattagcctacgctatcggcgatggcacgaccccagcgggtaatacgcatattgtgtgccttgggggggcccataatcatatccagccggaagaggacgtggaagcaacgaagatggccgttgaaaacatgtcgcctgggaatatggatatcaaacgtctggtcttccacaactggtgcaaggatgaatttgccaaaggcgcgtggttcttcgcccctccacagctgctgtcaaagagcctggatgaactgcgctgccgtcacggtaatgtcctgtttgcaaactccgattgggccttaggttggcgtggttttatcgatggtgctatcgaggagggcacccgcgcagcggttactgtaattgaggaactgcgtcctgcgcctgcggtgcgttcccacctg

SEQ ID NO: 984 - protein, 495 aa, synthetic construct
  REGION 1..495: note = Variant of monoamine oxidase
MTSRDGYQWTPETGLTQGVPSLGVISPPTNIEDTDKDGPWDVIVIGGGYCGLTATRDLTVAGFKTLLLEARDRIGGRSASSNIDGYPYEMGGTWVHWHQSHVWREITRYKMHNALSPSFNFSRGVNHFQLRTNPTTSTYMTHEAEDELLRSALHKFTNVDGTNGRTVLPFPHDMFYVPEFRKYDEMSYSERIDQIRDELSLNERSSLEAFILLCSGGTLENSSFGEFLHWWAMSGYTRQGCMDCLISYKFKDGQSAFARRFWEEAAGTGRLGYVFGCPVRSVVNERDAVRVTARDGREFAAKRLVCTIPLNVLSSVHFSPPLSPQRMAAANIGHVNQCVKVHAEVSCPDMRSWSGISYPFNKLAYAIGDGTTPAGNTHIVCLGGAHNHIQPEEDVEATKMAVENMSPGNMDIKRLVFHNWCKDEFAKGAWFFAPPQLLSKSLDELRCRHGNVLFANSDWALGWRGFIDGAIEEGTRAAVTVIEELRPAPAVRSHL

SEQ ID NO: 985 - DNA, 1485 bp, synthetic construct
  misc_feature 1..1485: note = Variant of monoamine oxidase
  source 1..1485: mol_type = other DNA
atgaccagccgcgacggctatcagtggaccccggaaacgggtctgacccagggcgtaccgtccctgggtgtcatttcgccgccgactaacatcgaagataccgataaggacgggccttgggatgtcattgtcattgggggcgggtattgtgggctgaccgcaacccgtgatttaaccgtcgcagggttcaagacgctgctgctggaggcccgtgatcgtattggtggccgctcctggagcagtaatattgacggttacccgtatgagatgggtggcacttgggttcattggcatcaatcgcacgtgtggcgtgaaatcacgcgttataaaatgcacaacgcgctgtctccatcatttaacttttcacgtggcgtgaatcacttccaactgcgtaccaatccgaccaccagtacgtacatgacgcacgaagcgtcggctgaactgctgcgtagcgcattgcataaattcaccaatgtcgacggcactaatggccgtacagtgttgccgttcccacatgatatgttttatgtgccggaatttcgcaagtatgacgaaatgtcatattccgaacgcattgaccagatccgcgacgaactgtctttgaacgaacgctctagtttagaggctttcattttattatgtagcggtggcaccctggaaaactccagctttggtgaatttctgcattggtgggcaatgtcgggttacacgtatcagggctgtatggattgtttaatgtcctataaatttaaggatggccagagtgcgttcgcgcgtcgcttctgggaagaagccgctggcactggccgtctgggctatgtctttggtactccggtgcgttctgtggtgaacgaacgcgacgcagtacgtgttaccgcacgtgacggtcgcgaattcgcagcgaaacgtttggtttgcacgattccgctgaacgtattgagttctgttcattttagcccaccactgtccccgcaacgcatggccgctgcgaacattggccatgttaaccagtgcgtcaaagtgcatgcggaagtcagttgcccagatatgcgttcatggtcgggtatctcctatccgttcaacaaattagcctacgctatcggcgatggcacgaccccagcgggtaatacgcatattgtgtgccttgggggggcccataatcatatccagccggaagaggacgtggaagcaacgaagatggccgttgaaaacatgtcgcctgggaatatggatatcaaacgtctggtcttccacaactggtgcaaggatgaatttgccaaaggcgcgtggttcttcgcccctccacagctgctgtcaaagagcctggatgaactgcgcgcacgtcacggtaatgtcctgtttgcaaactccgattgggccttaggttggcgtggttttatcgatggtgctatcgaggagggcacccgcgcagcggttactgtaattgaggaactgcgtcctgcgcctgcggtgcgttcccacctg

SEQ ID NO: 986 - protein, 495 aa, synthetic construct
  REGION 1..495: note = Variant of monoamine oxidase
MTSRDGYQWTPETGLTQGVPSLGVISPPTNIEDTDKDGPWDVIVIGGGYCGLTATRDLTVAGFKTLLLEARDRIGGRSWSSNIDGYPYEMGGTWVHWHQSHVWREITRYKMHNALSPSFNFSRGVNHFQLRTNPTTSTYMTHEASAELLRSALHKFTNVDGTNGRTVLPFPHDMFYVPEFRKYDEMSYSERIDQIRDELSLNERSSLEAFILLCSGGTLENSSFGEFLHWWAMSGYTYQGCMDCLMSYKFKDGQSAFARRFWEEAAGTGRLGYVFGTPVRSVVNERDAVRVTARDGREFAAKRLVCTIPLNVLSSVHFSPPLSPQRMAAANIGHVNQCVKVHAEVSCPDMRSWSGISYPFNKLAYAIGDGTTPAGNTHIVCLGGAHNHIQPEEDVEATKMAVENMSPGNMDIKRLVFHNWCKDEFAKGAWFFAPPQLLSKSLDELRARHGNVLFANSDWALGWRGFIDGAIEEGTRAAVTVIEELRPAPAVRSHL

SEQ ID NO: 987 - DNA, 1485 bp, synthetic construct
  misc_feature 1..1485: note = Variant of monoamine oxidase
  source 1..1485: mol_type = other DNA
atgaccagccgcgacggctatcagtggaccccggaaacgggtctgacccagggcgtaccgtccctgggtgtcatttcgccgccgactaacatcgaagataccgataaggacgggccttgggatgtcattgtcattgggggcgggtattgtgggctgaccgcaacccgtgatttaaccgtcgcagggttcaagacgctgctgctggaggcccgtgatcgtattggtggccgctcctggagcagtaatattgacggttacccgtatgagatgggtggcacttgggttcattggcatcaatcgcacgtgtggcgtgaaatcacgcgttataaaatgcacaacgcgctgtctccatcatttaacttttcacgtggcgtgaatcacttccaactgcgtaccaatccgaccaccagtacgtacatgacgcacgaagcggaggatgaactgctgcgtagcgcattgcataaattcaccaatgtcgacggcactaatggccgtacagtgttgccgttcccacatgatatgttttatgtgccggaatttcgcaagtatgacgaaatgtcatattccgaacgcattgaccagatccgcgacgaactgtctttgaacgaacgctctagtttagaggctttcattttattatgtagcggtggcaccctggaaaactccagctttggtgaatttctgcattggtgggcaatgtcgggttacacgtatcagggctgtatggattgtttaatttcctataaatttaaggatggccagagtgcgttcgcgcgtcgcttctgggaagaagccgctggcactggccgtctgggctatgtctttggttgcccggtgcgttctgtggtgaacgaacgcgacgcagtacgtgttaccgcacgtgacggtcgcgaattcgcagcgaaacgtttggtttgcacgattccgctgaacgtattgagttctgttcattttagcccaccactgtccccgcaacgcatggccgctgcgaacattggccatgttaaccagtgcgtcaaagtgcatgcggaagtcagttgcaaggatatgcgttcatggtcgggtatctcctatccgttcaacaaattagcctacgctatcggcgatggcacgaccccagcgggtaatacgcatattgtgtgccttgggggggcccataatcatatccagccggaagaggacgtggaagcaacgaagatggccgttgaaaacatgtcgcctgggaatatggatatcaaacgtctggtcttccacaactggtgcaaggatgaatttgccaaaggcgcgtggttcttcgcccctccacagctgctgtcaaagagcctggatgaacgtcgcgcacgtcacggtaatgtcctgtttgcaaactccgattgggccttaggttggcgtggttttatcgatggtgctatcgaggagggcacccgcgcagcggttactgtaattgaggaactgcgtcctgcgcctgcggtgcgttcccacctg

SEQ ID NO: 988 - protein, 495 aa, synthetic construct
  REGION 1..495: note = Variant of monoamine oxidase
MTSRDGYQWTPETGLTQGVPSLGVISPPTNIEDTDKDGPWDVIVIGGGYCGLTATRDLTVAGFKTLLLEARDRIGGRSWSSNIDGYPYEMGGTWVHWHQSHVWREITRYKMHNALSPSFNFSRGVNHFQLRTNPTTSTYMTHEAEDELLRSALHKFTNVDGTNGRTVLPFPHDMFYVPEFRKYDEMSYSERIDQIRDELSLNERSSLEAFILLCSGGTLENSSFGEFLHWWAMSGYTYQGCMDCLISYKFKDGQSAFARRFWEEAAGTGRLGYVFGCPVRSVVNERDAVRVTARDGREFAAKRLVCTIPLNVLSSVHFSPPLSPQRMAAANIGHVNQCVKVHAEVSCKDMRSWSGISYPFNKLAYAIGDGTTPAGNTHIVCLGGAHNHIQPEEDVEATKMAVENMSPGNMDIKRLVFHNWCKDEFAKGAWFFAPPQLLSKSLDERRARHGNVLFANSDWALGWRGFIDGAIEEGTRAAVTVIEELRPAPAVRSHL

SEQ ID NO: 989 - DNA, 1485 bp, synthetic construct
  misc_feature 1..1485: note = Variant of monoamine oxidase
  source 1..1485: mol_type = other DNA
atgaccagccgcgacggctatcagtggaccccggaaacgggtctgacccagggcgtaccgtccctgggtgtcatttcgccgccgactaacatcgaagataccgataaggacgggccttgggatgtcattgtcattgggggcgggtattgtgggctgaccgcaacccgtgatttaaccgtcgcagggttcaagacgctgctgctggaggcccgtgatcgtattggtggccgctcctggagcagtaatattgacggttacccgtatgagatgggtggcacttgggttcattggcatcaatctcacgtgtggcgtgaaatcacgcgttataaaatgcacaacgcgctgtctccatcatttaacttttcacgtggcgtgaatcacttccaactgcgtaccaatccgaccaccagtacgtacatgacgcacgaagcggaggatgaactgctgcgtagcgcattgcataaattcaccaatgtcgacggcactaatggccgtacagtgttgccgttcccacatgatatgttttatgtgccggaatttcgcaagtatgacgaaatgtcatattccgaacgcattgaccagatccgcgacgaactgtctttgaacgaacgctctagtttagaggctttcattttattatgtagcggtggcaccctggaaaactccagctttggtgaatttctgcattggtgggcaatgtcgggttacacgcgtcagggctgtttggattgtttaatctcctataaatttaaggatggccagagtgcgttcgcgcgtcgcttctgggaagaagccgctggcactggccgtctgggctatgtctttggttgtccggtgcgttctgtggtggatgaacgcgacgcagtacgtgttaccgcacgtgacggtcgcgaattcgcagcgaaacgtttggtttgcacgattccgctgaacgtattgagttctgttcattttagcccaccactgtccccgcaacgcatggccgctgcgaacatcggccatgttaaccagtgcgtcaaagtgcatgcggaagtcagttgtccggatatgcgttcatggtcgggtatctcctatccgttcaacaaattagcctacgctatcggcgatggcacgaccccagcgggtaatacgcatattgtgtgccttgggggggcccataatcatatccagccggaagaggacgtggaagcaacgaagatggccgttgaaaacatgtcgcctgggaatatggatatcaaacgtctggtcttccacaactggtgcaaggatgaatttgccaaaggcgcgtggttcttcgcccctccacagctgctgtcaaagagcctggatgaactgcgctgccgtcacggtaatgtcctgtttgcaaactccgattgggccttaggttggcgtggttttatcgatggtgctatcgaggagggcacccgcgcagcggttactgtaattgaggaactgcgtcctgcgcctgcggtgcgttcccacctg

SEQ ID NO: 990 - protein, 495 aa, synthetic construct
  REGION 1..495: note = Variant of monoamine oxidase
MTSRDGYQWTPETGLTQGVPSLGVISPPTNIEDTDKDGPWDVIVIGGGYCGLTATRDLTVAGFKTLLLEARDRIGGRSWSSNIDGYPYEMGGTWVHWHQSHVWREITRYKMHNALSPSFNFSRGVNHFQLRTNPTTSTYMTHEAEDELLRSALHKFTNVDGTNGRTVLPFPHDMFYVPEFRKYDEMSYSERIDQIRDELSLNERSSLEAFILLCSGGTLENSSFGEFLHWWAMSGYTRQGCLDCLISYKFKDGQSAFARRFWEEAAGTGRLGYVFGCPVRSVVDERDAVRVTARDGREFAAKRLVCTIPLNVLSSVHFSPPLSPQRMAAANIGHVNQCVKVHAEVSCPDMRSWSGISYPFNKLAYAIGDGTTPAGNTHIVCLGGAHNHIQPEEDVEATKMAVENMSPGNMDIKRLVFHNWCKDEFAKGAWFFAPPQLLSKSLDELRCRHGNVLFANSDWALGWRGFIDGAIEEGTRAAVTVIEELRPAPAVRSHL

SEQ ID NO: 991 - DNA, 1485 bp, synthetic construct
  misc_feature 1..1485: note = Variant of monoamine oxidase
  source 1..1485: mol_type = other DNA
atgaccagccgcgacggctatcagtggaccccggaaacgggtctgacccagggcgtaccgtccctgggtgtcatttcgccgccgactaacatcgaagataccgataaggacgggccttgggatgtcattgtcattgggggcgggtattgtgggctgaccgcaacccgtgatttaaccgtcgcagggttcaagacgctgctgctggaggcccgtgatcgtattggtggccgctcctggagcagtaatattgacggttacccgtatgagatgggtggcacttgggttcattggcatcaaccgcacgtgtggcgtgaaatcacgcgttataaaatgcacaacgcgctgtctccatcatttaacttttcacgtggcgtgaatcacttccaactgcgtaccaatccgaccaccagtacgtacatgacgcacgaagcgggggatgaactgctgcgtagcgcattgcataaattcaccaatgtcgacggcactaatggccgtacagtgttgccgttcccacatgatatgttttatgtgccggaatttcgcaagtatgacgaaatgtcatattccgaacgcattgaccagatccgcgacgatctgtctttgaacgaacgctctagtttagaggctttcattttattatgtagcggtggcaccctggaaaactccagctttggtgaatttctgcattggtgggcaatgtcgggttacacgtatcagggctgtatggattgtttaatctcctataaatttaaggatggccagagtgcgttcgcgcgtcgcttctgggaagaagccgctggcactggccgtctgggctatgtctttggtactccggtgcgttctgtggtgaacgaacgcgacgcagtacgtgttaccgcacgtgacggtcgcgaattcgcagcgaaacgtttggtttgcacgattccgctgaacgtattgagttctgttcattttagcccaccactgtccccgcaacgcatggccgctgcgaacattggccatgttaaccagtgcgtcaaagtgcatgcggaagtcagttgcaaggatatgcgttcatggtcgggtatctcctatccgttcaacaaattagcctacgctatcggcgatggcacgaccccagcgggtaatacgcatattgtgtgccttgggggggcccataatcatatccagccggaagaggacgtggaagcaacgaagatggccgttgaaaacatgtcgcctgggaatatggatatcaaacgtctggtcttccacaactggtgcaaggatgaatttgccaaaggcgcgtggttcttcgcccctccacagctgctgtcaaagagcctggatgaacgtcgctgtcgtcacggtaatgtcctgtttgcaaactccgattgggccttaggttggcgtggttttatcgatggtgctatcgaggagggcacccgcgcagcggttactgtaattgaggaactgcgtcctgcgcctgcggtgcgttcccacctg

SEQ ID NO: 992 - protein, 495 aa, synthetic construct
  REGION 1..495: note = Variant of monoamine oxidase
MTSRDGYQWTPETGLTQGVPSLGVISPPTNIEDTDKDGPWDVIVIGGGYCGLTATRDLTVAGFKTLLLEARDRIGGRSWSSNIDGYPYEMGGTWVHWHQPHVWREITRYKMHNALSPSFNFSRGVNHFQLRTNPTTSTYMTHEAGDELLRSALHKFTNVDGTNGRTVLPFPHDMFYVPEFRKYDEMSYSERIDQIRDDLSLNERSSLEAFILLCSGGTLENSSFGEFLHWWAMSGYTYQGCMDCLISYKFKDGQSAFARRFWEEAAGTGRLGYVFGTPVRSVVNERDAVRVTARDGREFAAKRLVCTIPLNVLSSVHFSPPLSPQRMAAANIGHVNQCVKVHAEVSCKDMRSWSGISYPFNKLAYAIGDGTTPAGNTHIVCLGGAHNHIQPEEDVEATKMAVENMSPGNMDIKRLVFHNWCKDEFAKGAWFFAPPQLLSKSLDERRCRHGNVLFANSDWALGWRGFIDGAIEEGTRAAVTVIEELRPAPAVRSHL

SEQ ID NO: 993 - DNA, 1485 bp, synthetic construct
  misc_feature 1..1485: note = Variant of monoamine oxidase
  source 1..1485: mol_type = other DNA
atgaccagccgcgacggctatcagtggaccccggaaacgggtctgacccagggcgtaccgtccctgggtgtcatttcgccgccgactaacatcgaagataccgataaggacgggccttgggatgtcattgtcattgggggcgggtattgtgggctgaccgcaacccgtgatttaaccgtcgcagggttcaagacgctgctgctggaggcccgtgatcgtattggtggccgctcctggagcagtaatattgacggttacccgtatgagatgggtggcacttgggttcattggcatcaatcgcacgtgtggcgtgaaatcacgcgttataaaatgcacaacgcgctgtctccatcatttaacttttcacgtggcgtgaatcacttccaactgcgtaccaatccgaccaccagtacgtacatgacgcacgaagcgggggctgaactgctgcgtagcgcattgcataaattcaccaatgtcgacggcactaatggccgtacagtgttgccgttcccacatgatatgttttatgtgccggaatttcgcaagtatgacgaaatgtcatattccgaacgcattgaccagatccgcgacgaactgtctttgaacgaacgctctagtttagaggctttcattttattatgtagcggtggcaccctggaaaactccagctttggtgaatttctgcattggtgggcaatgtcgggttacacgtatcagggctgtatggattgtttaatttcctataaatttaaggatggccagagtgcgttcgcgcgtcgcttctgggaagaagccgctggcactggccgtctgggctatgtctttggttgtccggtgcgttctgtggtgaacgaacgcgacgcagtacgtgttaccgcacgtgacggtcgcgaattcgcagcgaaacgtttggtttgcacgattccgctgaacgtattgagttctgttcattttagcccaccactgtccccgcaacgcatggccgctgcgaacattggccatgttaaccagtgcgtcaaagtgcatgcggaagtcagttgtccggatatgcgttcatggtcgggtatctcctatccgttcaacaaattagcctacgctatcggcgatggcacgaccccagcgggtaatacgcatattgtgtgccttgggggggcccataatcatatccagccggaagaggacgtggaagcaacgaagatggccgttgaaaacatgtcgcctgggaatatggatatcaaacgtctggtcttccacaactggtgcaaggatgaatttgccaaaggcgcgtggttcttcgcccctccacagctgctgtcaaagagcctggatgaacgtcgcgcacgtcacggtaatgtcctgtttgcaaactccgattgggccttaggttggcgtggttttatcgatggtgctatcgaggagggcacccgcgcagcggttactgtaattgaggaactgcgtcctgcgcctgcggtgcgttcccacctg

SEQ ID NO: 994 - protein, 495 aa, synthetic construct
  REGION 1..495: note = Variant of monoamine oxidase
MTSRDGYQWTPETGLTQGVPSLGVISPPTNIEDTDKDGPWDVIVIGGGYCGLTATRDLTVAGFKTLLLEARDRIGGRSWSSNIDGYPYEMGGTWVHWHQSHVWREITRYKMHNALSPSFNFSRGVNHFQLRTNPTTSTYMTHEAGAELLRSALHKFTNVDGTNGRTVLPFPHDMFYVPEFRKYDEMSYSERIDQIRDELSLNERSSLEAFILLCSGGTLENSSFGEFLHWWAMSGYTYQGCMDCLISYKFKDGQSAFARRFWEEAAGTGRLGYVFGCPVRSVVNERDAVRVTARDGREFAAKRLVCTIPLNVLSSVHFSPPLSPQRMAAANIGHVNQCVKVHAEVSCPDMRSWSGISYPFNKLAYAIGDGTTPAGNTHIVCLGGAHNHIQPEEDVEATKMAVENMSPGNMDIKRLVFHNWCKDEFAKGAWFFAPPQLLSKSLDERRARHGNVLFANSDWALGWRGFIDGAIEEGTRAAVTVIEELRPAPAVRSHL

SEQ ID NO: 995 - DNA, 1485 bp, synthetic construct
  misc_feature 1..1485: note = Variant of monoamine oxidase
  source 1..1485: mol_type = other DNA
atgaccagccgcgacggctatcagtggaccccggaaacgggtctgacccagggcgtaccgtccctgggtgtcatttcgccgccgactaacatcgaagataccgataaggacgggccttgggatgtcattgtcattgggggcgggtattgtgggctgaccgcaacccgtgatttaaccgtcgcagggttcaagacgctgctgctggaggcccgtgatcgtattggtggccgctcctggcacagtaatattgacggttacccgtatgagatgggtggcacttgggttcattggcatcaatctcacgtgtggcgtgaaatcacgcgttataaaatgcacaacgcgctgtctccatcatttaacttttcacgtggcgtgaatcacttccaactgcgtaccaatccgaccaccagtacgtacatgacgcacgaagcggaggatgaactgctgcgtagcgcattgcataaattcaccaatgtcgacggcactaatggccgtacagtgttgccgttcccacatgatatgttttatgtgccggaatttcgcaagtatgacgaaatgtcatattccgaacgcattgaccagatccgcgacgaactgtctttgaacgaacgctctagtttagaggctttcattttattatgtagcggtggcaccctggaaaactccagctttggtgaatttctgcattggtgggcaatgtcgggttacacgtaccagggctgtatggattgtttaatctcctataaatttaaggatggccagagtgcgttcgcgcgtcgcttctgggaagaagccgctggcactggccgtctgggctatgtctttggttgtccggtgcgttctgtggtgaatgaacgcgacgcagtacgtgttaccgcacgtgacggtcgcgaattcgcagcgaaacgtttggtttgcacgattccgctgaacgtattgagttctgttcattttagcccaccactgtccccgcaacgcatggccgctgcgaacattggccatgttaaccagtgcgtcaaagtgcatgcggaagtcagttgtccggatatgcgttcatggtcgggtatctcctatccgttcaacaaattagcctacgctatcggcgatggcacgaccccagcgggtaatacgcatattgtgtgccttgggggggcccataatcatatccagccggaagaggacgtggaagcaacgaagatggccgttgaaaacatgtcgcctgggaatatggatatcaaacgtctggtcttccacaactggtgcaaggatgaatttgccaaaggcgggtggttcttcgcccctccacagctgctgtcaaagagcctggatgaactgcgctgccgtcacggtaatgtcctgtttgcaaactccgattgggccttaggttggcgtggttttatcgatggtgctatcgaggagggcacccgcgcagcggttactgtaattgaggaactgcgtcctgcgcctgcggtgcgttcccacctg

SEQ ID NO: 996 - protein, 495 aa, synthetic construct; identical to SEQ ID NO: 448
  REGION 1..495: note = Variant of monoamine oxidase

SEQ ID NO: 997 - DNA, 1485 bp, synthetic construct
  misc_feature 1..1485: note = Variant of monoamine oxidase
  source 1..1485: mol_type = other DNA
atgaccagccgcgacggctatcagtggaccccggaaacgggtctgacccagggcgtaccgtccctgggtgtcatttcgccgccgactaacatcgaagataccgataaggacgggccttgggatgtcattgtcattgggggcgggtattgtgggctgaccgcaacccgtgatttaaccgtcgcagggttcaagacgctgctgctggaggcccgtgatcgtattggtggccgctcctggagcagtaatattgacggttacccgtatgagatgggtggcacttgggttcattggcatcaatctcacgtgtggcgtgaaatcacgcgttataaaatgcacaacgcgctgtctccatcatttaacttttcacgtggcgtgaatcacttccaactgcgtaccaatccgaccaccagtacgtacatgacgcacgaagcggaggatgaactgctgcgtagcgcattgcataaattcaccaatgtcgacggcactaatggccgtacagtgttgccgttcccacatgatatgttttatgtgccggaatttcgcaagtatgatgaaatgtcatattccgaacgcattgaccagatccgcgacgaactgtctttgaacgaacgctctagtttagaggctttcattttattatgtagcggtggcaccctggaaaactccagctttggtgaatttctgcattggtgggcaatgtcgggttacacgcgtcagggctgtatggattgtttaatctcctataaatttaaggatggccagagtgcgttcgcgcgtcgcttctgggaagaagccgctggcactggccgtctgggctatgtctttggttgtccggtgcgttctgtggtgaacgaacgcgacgcagtacgtgttaccgcacgtgacggtcgcgaattcgcagcgaaacgtttggtttgcacgattccgctgaacgtattgagttctgttcattttagcccaccactgtccccgcaacgcatggccgctgcgaacatcggccatgttaaccagtgcgtcaaagtgcatgcggaagtcagttgtccggatatgcgttcatggtcgggtatctcctatccgttcaacaaattagcctacgctatcggcgatggcacgaccccagcgggtaatacgcatattgtgtgccttgggggggccgagaatcatatccagccggaagaggacgtggaagcaacgaagatggccgttgaaaacatgtcgcctgggaatatggatatcaaacgtctggtcttccacaactggtgcaaggatgaatttgccaaaggcgggtggttcttcgcccctccacagctgctgtcaaagagcctggatgaactgcgctgccgtcacggtaatgtcctgtttgcaaactccgattgggccttaggttggcgtggttttatcgatggtgctatcgaggagggcacccgcgcagcggttactgtaattgaggaactgcgtcctgcgcctgcggtgcgttcccacctg

SEQ ID NO: 998 - protein, 495 aa, synthetic construct
  REGION 1..495: note = Variant of monoamine oxidase
MTSRDGYQWTPETGLTQGVPSLGVISPPTNIEDTDKDGPWDVIVIGGGYCGLTATRDLTVAGFKTLLLEARDRIGGRSWSSNIDGYPYEMGGTWVHWHQSHVWREITRYKMHNALSPSFNFSRGVNHFQLRTNPTTSTYMTHEAEDELLRSALHKFTNVDGTNGRTVLPFPHDMFYVPEFRKYDEMSYSERIDQIRDELSLNERSSLEAFILLCSGGTLENSSFGEFLHWWAMSGYTRQGCMDCLISYKFKDGQSAFARRFWEEAAGTGRLGYVFGCPVRSVVNERDAVRVTARDGREFAAKRLVCTIPLNVLSSVHFSPPLSPQRMAAANIGHVNQCVKVHAEVSCPDMRSWSGISYPFNKLAYAIGDGTTPAGNTHIVCLGGAENHIQPEEDVEATKMAVENMSPGNMDIKRLVFHNWCKDEFAKGGWFFAPPQLLSKSLDELRCRHGNVLFANSDWALGWRGFIDGAIEEGTRAAVTVIEELRPAPAVRSHL

SEQ ID NO: 999 - DNA, 1485 bp, synthetic construct
  misc_feature 1..1485: note = Variant of monoamine oxidase
  source 1..1485: mol_type = other DNA
atgaccagccgcgacggctatcagtggaccccggaaacgggtctgacccagggcgtaccgtccctgggtgtcatttcgccgccgactaacatcgaagataccgataaggacgggccttgggatgtcattgtcattgggggcgggtattgtgggctgaccgcaacccgtgatttaaccgtcgcagggttcaagacgctgctgctggaggcccgtgatcgtattggtggccgctcctggagcagtaatattgacggttacccgtatgagatgggtggcacttgggttcattggcatcaatctcacgtgtggcgtgaaatcacgcgttataaaatgcacaatgcgctgtctccgtcatttaacttttcacgtggcgtgaatcacttccaactgcgtaccaatccgaccaccagtacgtacatgacgcacgaagcgctggatgaactgatgcgtagcgcattgcataaattcaccaatgtcgacggcactaatggccgtacagtgttgccgttcccacatgatatgttttatgtgccggaatttcgcaagtatgacgaaatgtcatattccgaacgcattgaccagatccgcgacgacctgtctttgaacgaacgctctagtttagaggctttcattttattatgtagcggtggcaccctggaaaactccagctttggtgaatttctgcattggtgggcaatgtcgggttacacgtatcagggctgtatggattgtttaatctcctataaatttaaggatggccagagtgcgttcgcgcgtagcttctgggaagaagccctgggcactggccgtctgggctatgtctttggttgtccggtgcgttctgtggtgaacgaacgcgacgcagtacgtgttaccgcacgtgacggtcgcgaattcgcagcgaaacgtttggtttgcacgattccgctgaacgtattgagttctgttcattttagcccaccactgtccccgcaacgcatggccgctgcgaacattggccatgttaaccagggcgtcaaagtgcatgcggaagtcagtaacccggatatgcgttcatggtcgggtatctcctatccgttcaacaaattagcctacgctatcggcgatggcacgaccccagcgggtaatacgcatattgtgtgccttgggggggcccataatcatatccagccggaagaggacgtggaagcaacgaagatggccgttgaaaacatgtcgcctgggaatatggatatcaaacgtctggtcttccacaactggtgcaaggatgaatttgccaaaggcgggtggttcttcgcccctccacagctgctgtcaaagagcctggatgaactgcgctgccgtcacggtaatgtcctgtttgcaaactccgattgggccttaggttggcgtggttttatcgatggtgctatcgaggagggcacccgcgcagcggttactgtaattgaggaactgcgtcctgcgcctgcggtgcgttcccacctg

SEQ ID NO: 1000 - protein, 495 aa, synthetic construct
  REGION 1..495: note = Variant of monoamine oxidase
MTSRDGYQWTPETGLTQGVPSLGVISPPTNIEDTDKDGPWDVIVIGGGYCGLTATRDLTVAGFKTLLLEARDRIGGRSWSSNIDGYPYEMGGTWVHWHQSHVWREITRYKMHNALSPSFNFSRGVNHFQLRTNPTTSTYMTHEALDELMRSALHKFTNVDGTNGRTVLPFPHDMFYVPEFRKYDEMSYSERIDQIRDDLSLNERSSLEAFILLCSGGTLENSSFGEFLHWWAMSGYTYQGCMDCLISYKFKDGQSAFARSFWEEALGTGRLGYVFGCPVRSVVNERDAVRVTARDGREFAAKRLVCTIPLNVLSSVHFSPPLSPQRMAAANIGHVNQGVKVHAEVSNPDMRSWSGISYPFNKLAYAIGDGTTPAGNTHIVCLGGAHNHIQPEEDVEATKMAVENMSPGNMDIKRLVFHNWCKDEFAKGGWFFAPPQLLSKSLDELRCRHGNVLFANSDWALGWRGFIDGAIEEGTRAAVTVIEELRPAPAVRSHL

SEQ ID NO: 1001 - DNA, 1485 bp, synthetic construct
  misc_feature 1..1485: note = Variant of monoamine oxidase
  source 1..1485: mol_type = other DNA
atgaccagccgcgacggctatcagtggaccccggaaacgggtctgacccagggcgtaccgtccctgggtgtcatttcgccgccgactaacatcgaagataccgataaggacgggccttgggatgtcattgtcattgggggcgggtattgtgggctgaccgcaacccgtgatttaaccgtcgcagggttcaagacgctgctgctggaggcccgtgatcgtattggtggccgctcctggagcagtaatattgacggttacccgtatgagatgggtggcacttgggttcattggcatcaatctcacgtgtggcgtgaaatcacgcgttataaaatgcacggggcgctgtctaaatcatttaacttttcacgtggcgtgaatcacttccaactgcgtaccaatccgaccaccagtacgtacatgacgcacgaagcggaggctgaactgatgcgtagcgcattgcataaattcaccaatgtcgacggcactaatggccgtacagtgttgccgttcccacatgatatgttttatgtgccggaatttcgcaagtatgacgaaatgtcatattccgaacgcattgaccagatccgcgacgaactgtctttgaacgaacgctctagtttagaggctttcattttattatgtagcggtggcaccctggaaaactccagctttggtgaatttctgcattggtgggcaatgtcgggttacacgtatcagggctgtatggattgtttaatctcctataaatttaaggatggccagagtgcgttcgcgcgtagcttctttgaagaagccgctggcactggccgtctgggctatgtctttggttgtccggtgcgttctgtggtgaacgaacgcgacgcagtacgtgttaccgcacgtgacggtcgcgaattcgcagcgaaacgtttggtttgcacgattccgctgaacgtattgagttctgttcattttagcccaccactgtccccgcaacgcatggccgctgcgaacattggccatgttaaccagtgcgtcaaagtgcatgcggaagtcagttgtccggatatgcgttcatggtcgggtatctcctatccgttcaacaaattagcctacgctatcggcgatggcacgaccccagcgggtaatacgcatattgtgtgccttgggggggcccataatcatatccagccggaagaggacgtggaagcaacgaagatggccgttgaaaacatgtcgcctgggaatatggatatcaaacgtctggtcttccacaactggtgcaaggatgaatttgccaaaggcgggtggttcttcgcccctccacagctgctgtcaaagagcctggatgaactgcgctgccgtcacggtaatgtcctgtttgcaaactccgattgggccttaggttggcgtggttttatcgatggtgctatcgaggagggcacccgcgcagcggttactgtaattgaggaactgcgtcctgcgcctgcggtgcgttcccacctg

SEQ ID NO: 1002 - protein, 495 aa, synthetic construct
  REGION 1..495: note = Variant of monoamine oxidase
MTSRDGYQWTPETGLTQGVPSLGVISPPTNIEDTDKDGPWDVIVIGGGYCGLTATRDLTVAGFKTLLLEARDRIGGRSWSSNIDGYPYEMGGTWVHWHQSHVWREITRYKMHGALSKSFNFSRGVNHFQLRTNPTTSTYMTHEAEAELMRSALHKFTNVDGTNGRTVLPFPHDMFYVPEFRKYDEMSYSERIDQIRDELSLNERSSLEAFILLCSGGTLENSSFGEFLHWWAMSGYTYQGCMDCLISYKFKDGQSAFARSFFEEAAGTGRLGYVFGCPVRSVVNERDAVRVTARDGREFAAKRLVCTIPLNVLSSVHFSPPLSPQRMAAANIGHVNQCVKVHAEVSCPDMRSWSGISYPFNKLAYAIGDGTTPAGNTHIVCLGGAHNHIQPEEDVEATKMAVENMSPGNMDIKRLVFHNWCKDEFAKGGWFFAPPQLLSKSLDELRCRHGNVLFANSDWALGWRGFIDGAIEEGTRAAVTVIEELRPAPAVRSHL

SEQ ID NO: 1003 - DNA, 1485 bp, synthetic construct
  misc_feature 1..1485: note = Variant of monoamine oxidase
  source 1..1485: mol_type = other DNA
atgaccagccgcgacggctatcagtggaccccggaaacgggtctgacccagggcgtaccgtccctgggtgtcatttcgccgccgactaacatcgaagataccgataaggacgggccttgggatgtcattgtcattgggggcgggtattgtgggctgaccgcaacccgtgatttaaccgtcgcagggttcaagacgctgctgctggaggcccgtgatcgtattggtggccgctcctggagcagtaatattgacggttacgggtatgagatgggtggcacttgggttcattggcatcaatctcacgtgtggcgtgaaatcacgcgttataaaatgcacaatgcgctgtctccgtcatttaacttttcacgtggcgtgaatcacttccaactgcgtaccaatccgaccaccagtacgtacatgacgcacgaagcgctggatgaactgatgcgtagcgcattgcataaattcaccaatgtcgacggcactaatggccgtacagtgttgccgttcccacatgatatgttttatgtgccggaatttcgcaagtatgacgaaatgtcatattccgaacgcattgaccagatccgcgacgacctgtctttgaacgaacgctctagtttagaggctttcattttattatgtagcggtggcaccctggaaaactccagctttggtgaatttctgcattggtgggcaatgtcgggttacacgtatcagggctgtatggattgtttaatctcctataaatttaaggatggccagagtgcgttcgcgcgtcgcttctgggaagaagccgctggcactggccgtctgggctatgtctttggttgtccggtgcgttctgtggtgaacgaacgcgacgcagtacgtgttaccgcacgtgacggtcgcgaattcgcagcgaaacgtttggtttgcacgattccgctgaacgtattgagttctgttcattttagcccaccactgtccccgcaacgcatggccgctgcgaacattggccatgttaaccagtgcgtcaaagtgcatgcggaagtcagttgtccggatatgcgttcatggtcgggtatctcctatccgttcaacaaattagcctacgctatcggcgatggcacgaccccagcgggtaatacgcatattgtgtgtcttggtggggcccataatcatatccagccggaagaggacgtggaagcaacgaagatggccgttgaaaacatgtcgcctgggaatatggatatcaaacgtctggtcttccacaactggtgcaaggatgaatttgccaaaggcgggtggttcttcgcccctccacagctgctgtcaaagagcctggatgaactgcgcgctcgtcacggtaatgtcctgtttgcaaactccgattgggccttaggttggcgtggttttatcgatggtgctatcgaggagggcacccgcgcagcggttactgtaattgaggaactgcgtcctgcgcctgcggtgcgttcccacctg

SEQ ID NO: 1004 - protein, 495 aa, synthetic construct
  REGION 1..495: note = Variant of monoamine oxidase
MTSRDGYQWTPETGLTQGVPSLGVISPPTNIEDTDKDGPWDVIVIGGGYCGLTATRDLTVAGFKTLLLEARDRIGGRSWSSNIDGYGYEMGGTWVHWHQSHVWREITRYKMHNALSPSFNFSRGVNHFQLRTNPTTSTYMTHEALDELMRSALHKFTNVDGTNGRTVLPFPHDMFYVPEFRKYDEMSYSERIDQIRDDLSLNERSSLEAFILLCSGGTLENSSFGEFLHWWAMSGYTYQGCMDCLISYKFKDGQSAFARRFWEEAAGTGRLGYVFGCPVRSVVNERDAVRVTARDGREFAAKRLVCTIPLNVLSSVHFSPPLSPQRMAAANIGHVNQCVKVHAEVSCPDMRSWSGISYPFNKLAYAIGDGTTPAGNTHIVCLGGAHNHIQPEEDVEATKMAVENMSPGNMDIKRLVFHNWCKDEFAKGGWFFAPPQLLSKSLDELRARHGNVLFANSDWALGWRGFIDGAIEEGTRAAVTVIEELRPAPAVRSHL

SEQ ID NO: 1005 - DNA, 1485 bp, synthetic construct
  misc_feature 1..1485: note = Variant of monoamine oxidase
  source 1..1485: mol_type = other DNA
atgaccagccgcgacggctatcagtggaccccggaaacgggtctgacccagggcgtaccgtccctgggtgtcatttcgccgccgactaacatcgaagataccgataaggacgggccttgggatgtcattgtcattgggggcgggtattgtgggctgaccgcaacccgtgatttaaccgtcgcagggttcaagacgctgctgctggaggcccgtgatcgtattggtggccgctcctggagcagtaatattgacggttacccgtatgagatgggtggcacttgggttcattggcatcaatctcacgtgtggcgtgaaatcacgcgttataaaatgcacaacgcgctgtctccgtcatttaacttttcacgtggcgtgaatcacttccaactgcgtaccaatccgaccaccagtacgtacatgacgcacgaagcggaggatgaactgatgcgtagcgcattgcataaattcaccaatgtcgacggcactaatggccgtacagtgttgccgttcccacatgatatgttttatgtgccggaatttcgcaagtatgacgaaatgtcatattccgaacgcattgaccagatccgcgacgacctgtctttgaacgaacgctctagtttagaggctttcattttattatgtagcggtggcaccctggaaaactccagctttggtgaatttctgcattggtgggcaatgtcgggttacacgtatcagggctgtatggattgtttaatgtcctataaatttaaggatggccagagtgcgttcgcgcgtagcttctgggaagaagccctgggcactggccgtctgggctatgtctttggttgtccggtgcgttctgtggtgaacgaacgcgacgcagtacgtgttaccgcacgtgacggtcgcgaattcgcagcgaaacgtttggtttgcacgattccgctgaacgtattgagttctgttcattttagcccaccactgtccccgcaacgcatggccgctgcgaacattggccatgttaaccagtgcgtcaaagtgcatgcggaagtcagttgcccggatatgcgttcatggtcgggtatctcctatccgttcaacaaattagcctacgctatcggcgatggcacgaccccagcgggtaatacgcatattgtgtgtcttggtggggcccataatcatatccagccggaagaggacgtggaagcaacgaagatggccgttgaaaacatgtcgcctgggaatatggatatcaaacgtctggtcttccacaactggagcaaggatgaatttgccaaaggcgggtggttcttcgcccctccacagctgctgtcaaagagcctggatgaactgcgctgtcgtcacggtaatgtcctgtttgcaaactccgattgggccttaggttggcgtggttttatcgatggtgctatcgaggagggcacccgcgcagcggttactgtaattgaggaactgcgtcctgcgcctgcggtgcgttcccacctg

SEQ ID NO: 1006 - protein, 495 aa, synthetic construct
  REGION 1..495: note = Variant of monoamine oxidase
MTSRDGYQWTPETGLTQGVPSLGVISPPTNIEDTDKDGPWDVIVIGGGYCGLTATRDLTVAGFKTLLLEARDRIGGRSWSSNIDGYPYEMGGTWVHWHQSHVWREITRYKMHNALSPSFNFSRGVNHFQLRTNPTTSTYMTHEAEDELMRSALHKFTNVDGTNGRTVLPFPHDMFYVPEFRKYDEMSYSERIDQIRDDLSLNERSSLEAFILLCSGGTLENSSFGEFLHWWAMSGYTYQGCMDCLMSYKFKDGQSAFARSFWEEALGTGRLGYVFGCPVRSVVNERDAVRVTARDGREFAAKRLVCTIPLNVLSSVHFSPPLSPQRMAAANIGHVNQCVKVHAEVSCPDMRSWSGISYPFNKLAYAIGDGTTPAGNTHIVCLGGAHNHIQPEEDVEATKMAVENMSPGNMDIKRLVFHNWSKDEFAKGGWFFAPPQLLSKSLDELRCRHGNVLFANSDWALGWRGFIDGAIEEGTRAAVTVIEELRPAPAVRSHL

SEQ ID NO: 1007 - DNA, 1485 bp, synthetic construct
  misc_feature 1..1485: note = Variant of monoamine oxidase
  source 1..1485: mol_type = other DNA
atgaccagccgcgacggctatcagtggaccccggaaacgggtctgacccagggcgtaccgtccctgggtgtcatttcgccgccgactaacatcgaagataccgataaggacgggccttgggatgtcattgtcattgggggcgggtattgtgggctgaccgcaacccgtgatttaaccgtcgcagggttcaagacgctgctgctggaggcccgtgatcgtattggtggccgctcctggagcagtaatattgacggttacccgtatgagatgggtggcacttgggttcattggcatcaatctcacgtgtggcgtgaaatcacgcgttataaaatgcacaatgcgctgtctaaatcatttaacttttcacgtggcgtgaatcacttccaactgcgtaccaatccgaccaccagtacgtacatgacgcacgaagcgctggatgaactgatgcgtagcgcattgcataaattcaccaatgtcgacggcactaatggccgtacagtgttgccgttcccacatgatatgttttatgtgccggaatttcgcaagtatgacgaaatgtcatattccgaacgcattgaccagatccgcgacgaactgtctttgaacgaacgctctagtttagaggctttcattttattatgtagcggtggcaccctggaaaactccagctttggtgaatttctgcattggtgggcaatgtcgggttacacgtatcagggctgtatggattgtttaatctcctataaatttaaggatggccagagtgcgttcgcgcgtcgcttctgggaagaagccgctggcactggccgtctgggctatgtctttggttgtccggtgcgttctgtggtggacgaacgcgacgcagtacgtgttaccgcacgtgacggtcgcgaattcgcagcgaaacgtttggtttgcacgattccgctgaacgtattgagttctgttcattttagcccaccactgtccccgcaacgcatggccgctgcgaacattggccatgttaaccagtgcgtcaaagtgcatgcggaagtcagttgcccggatatgcgttcatggtcgggtatctcctatccgttcaacaaattagcctacgctatcggcgatggcacgaccccagcgggtaatacgcatattgtgtgtcttggtggggcccataatcatatccagccggaagaggacgtggaagcaacgaagatggccgttgaaaacatgtcgcctgggaatatggatatcaaacgtctggtcttccacaactggtgcaaggatgaatttgccaaaggcgggtggttcttcgcccctccacagctgctgtcaaagagcctggatgaactgcgcgctcgtcacggtaatgtcctgtttgcaaactccgattgggccttaggttggcgtggttttatcgatggtgctatcgaggagggcacccgcgcagcggttactgtaattgaggaactgcgtcctgcgcctgcggtgcgttcccacctg

SEQ ID NO: 1008 - protein, 495 aa, synthetic construct
  REGION 1..495: note = Variant of monoamine oxidase
MTSRDGYQWTPETGLTQGVPSLGVISPPTNIEDTDKDGPWDVIVIGGGYCGLTATRDLTVAGFKTLLLEARDRIGGRSWSSNIDGYPYEMGGTWVHWHQSHVWREITRYKMHNALSKSFNFSRGVNHFQLRTNPTTSTYMTHEALDELMRSALHKFTNVDGTNGRTVLPFPHDMFYVPEFRKYDEMSYSERIDQIRDELSLNERSSLEAFILLCSGGTLENSSFGEFLHWWAMSGYTYQGCMDCLISYKFKDGQSAFARRFWEEAAGTGRLGYVFGCPVRSVVDERDAVRVTARDGREFAAKRLVCTIPLNVLSSVHFSPPLSPQRMAAANIGHVNQCVKVHAEVSCPDMRSWSGISYPFNKLAYAIGDGTTPAGNTHIVCLGGAHNHIQPEEDVEATKMAVENMSPGNMDIKRLVFHNWCKDEFAKGGWFFAPPQLLSKSLDELRARHGNVLFANSDWALGWRGFIDGAIEEGTRAAVTVIEELRPAPAVRSHL

SEQ ID NO: 1009 - DNA, 1485 bp, synthetic construct
  misc_feature 1..1485: note = Variant of monoamine oxidase
  source 1..1485: mol_type = other DNA
atgaccagccgcgacggctatcagtggaccccggaaacgggtctgacccagggcgtaccgtccctgggtgtcatttcgccgccgactaacatcgaagataccgataaggacgggccttgggatgtcattgtcattgggggcgggtattgtgggctgaccgcaacccgtgatttaaccgtcgcagggttcaagacgctgctgctggaggcccgtgatcgtattggtggccgctcctggagcagtaatattgacggttacccgtatgagatgggtggcacttgggttcattggcatcaatctcacgtgtggcgtgaaatcacgcgttataaaatgcacaacgcgctgtctccatcatttaacttttcacgtggcgtgaatcacttccaactgcgtaccaatccgaccaccagtacgtacatgacgcacgaagcggaggctgaactgatgcgtagcgcattgcataaattcaccaatgtcgacggcactaatggccgtacagtgttgccgttcccacatgatatgttttatgtgccggaatttcgcaagtatgacgaaatgtcatattccgaacgcattgaccagatccgcgacgaactgtctttgaacgaacgctctagtttagaggctttcattttattatgtagcggtggcaccctggaaaactccagctttggtgaatttctgcattggtgggcaatgtcgggttacacgtatcagggctgtatggattgtttaatctcctataaatttaaggatggccagagtgcgttcgcgcgtagcttctttgaagaagccgctggcactggccgtctgggctatgtctttggttgtccggtgcgttctgtggtgaacgaacgcgacgcagtacgtgttaccgcacgtgacggtcgcgaattcgcagcgaaacgtttggtttgcacgattccgctgaacgtattgagttctgttcattttagcccaccactgtccccgcaacgcatggccgctgcgaacattggccatgttaaccagtgcgtcaaagtgcatgcggaagtcagtaacccggatatgcgttcatggtcgggtatctcctatccgttcaacaaattagcctacgctatcggcgatggcacgaccccagcgggtaatacgcatattgtgtgtcttggtggggcccataatcatatccagccggaagaggacgtggaagcaacgaagatggccgttgaaaacatgtcgcctgggaatatggatatcaaacgtctggtcttccacaactggtgcaaggatgaatttgccaaaggcgggtggttcttcgcccctccacagctgctgtcaaagagcctggatgaactgcgctgccgtcacggtaatgtcctgtttgcaaactccgattgggccttaggttggcgtggttttatcgatggtgctatcgaggagggcacccgcgcagcggttactgtaattgaggaactgcgtcctgcgcctgcggtgcgttcccacctg

SEQ ID NO: 1010 - protein, 495 aa, synthetic construct
  REGION 1..495: note = Variant of monoamine oxidase
MTSRDGYQWTPETGLTQGVPSLGVISPPTNIEDTDKDGPWDVIVIGGGYCGLTATRDLTVAGFKTLLLEARDRIGGRSWSSNIDGYPYEMGGTWVHWHQSHVWREITRYKMHNALSPSFNFSRGVNHFQLRTNPTTSTYMTHEAEAELMRSALHKFTNVDGTNGRTVLPFPHDMFYVPEFRKYDEMSYSERIDQIRDELSLNERSSLEAFILLCSGGTLENSSFGEFLHWWAMSGYTYQGCMDCLISYKFKDGQSAFARSFFEEAAGTGRLGYVFGCPVRSVVNERDAVRVTARDGREFAAKRLVCTIPLNVLSSVHFSPPLSPQRMAAANIGHVNQCVKVHAEVSNPDMRSWSGISYPFNKLAYAIGDGTTPAGNTHIVCLGGAHNHIQPEEDVEATKMAVENMSPGNMDIKRLVFHNWCKDEFAKGGWFFAPPQLLSKSLDELRCRHGNVLFANSDWALGWRGFIDGAIEEGTRAAVTVIEELRPAPAVRSHL

SEQ ID NO: 1011 - DNA, 1485 bp, synthetic construct
  misc_feature 1..1485: note = Variant of monoamine oxidase
  source 1..1485: mol_type = other DNA
atgaccagccgcgacggctatcagtggaccccggaaacgggtctgacccagggcgtaccgtccctgggtgtcatttcgccgccgactaacatcgaagataccgataaggacgggccttgggatgtcattgtcattgggggcgggtattgtgggctgaccgcaacccgtgatttaaccgtcgcagggttcaagacgctgctgctggaggcccgtgatcgtattggtggccgctcctggagcagtaatattgacggttacctgtatgagatgggtggcacttgggttcattggcatcaatctcacgtgtggcgtgaaatcacgcgttataaaatgcacaacgcgctgtctccatcatttaacttttcacgtggcgtgaatcacttccaactgcgtaccaatccgaccaccagtacgtacatgacgcacgaagcggaggatgaactgatgcgtagcgcattgcataaattcaccaatgtcgacggcactaatggccgtacagtgttgccgttcccacatgatatgttttatgtgccggaatttcgcaagtatgacgaaatgtcatattccgaacgcattgaccagatccgcgacgagctgtctttgaacgaacgctctagtttagaggctttcattttattatgtagcggtggcaccctggaaaactccagctttggtgaatttctgcattggtgggcaatgtcgggttacacgtatcagggctgtatggattgtttaatttcctataaatttaaggatggccagagtgcgttcgcgcgtagcttctttgaagaagccctgggcactggccgtctgggctatgtctttggttgtccggtgcgttctgtggtgaacgaacgcgacgcagtacgtgttaccgcacgtgacggtcgcgaattcgcagcgaaacgtttggtttgcacgattccgctgaacgtattgagttctgttcattttagcccaccactgtccccgcaacgcatggccgctgcgaacattggccatgttaaccagtgcgtcaaagtgcatgcggaagtcagttgcccggatatgcgttcatggtcgggtatctcctatccgttcaacaaattagcctacgctatcggcgatggcacgaccccagcgggtaatacgcatattgtggctcttggtggggcccataatcatatccagccggaagaggacgtggaagcaacgaagatggccgttgaaaacatgtcgcctgggaatatggatatcaaacgtctggtcttccacaactggtgcaaggatgaatttgccaaaggcgggtggttcttcgcccctccacagctgctgtcaaagagcctggatgaactgcgctgtcgtcacggtaatgtcctgtttgcaaactccgattgggccttaggttggcgtggttttatcgatggtgctatcgaggagggcacccgcgcagcggttactgtaattgaggaactgcgtcctgcgcctgcggtgcgttcccacctg

SEQ ID NO: 1012 - protein, 495 aa, synthetic construct
  REGION 1..495: note = Variant of monoamine oxidase
MTSRDGYQWTPETGLTQGVPSLGVISPPTNIEDTDKDGPWDVIVIGGGYCGLTATRDLTVAGFKTLLLEARDRIGGRSWSSNIDGYLYEMGGTWVHWHQSHVWREITRYKMHNALSPSFNFSRGVNHFQLRTNPTTSTYMTHEAEDELMRSALHKFTNVDGTNGRTVLPFPHDMFYVPEFRKYDEMSYSERIDQIRDELSLNERSSLEAFILLCSGGTLENSSFGEFLHWWAMSGYTYQGCMDCLISYKFKDGQSAFARSFFEEALGTGRLGYVFGCPVRSVVNERDAVRVTARDGREFAAKRLVCTIPLNVLSSVHFSPPLSPQRMAAANIGHVNQCVKVHAEVSCPDMRSWSGISYPFNKLAYAIGDGTTPAGNTHIVALGGAHNHIQPEEDVEATKMAVENMSPGNMDIKRLVFHNWCKDEFAKGGWFFAPPQLLSKSLDELRCRHGNVLFANSDWALGWRGFIDGAIEEGTRAAVTVIEELRPAPAVRSHL

SEQ ID NO: 1013 - DNA, 1485 bp, synthetic construct
  misc_feature 1..1485: note = Variant of monoamine oxidase
  source 1..1485: mol_type = other DNA
atgaccagccgcgacggctatcagtggaccccggaaacgggtctgacccagggcgtaccgtccctgggtgtcatttcgccgccgactaacatcgaagataccgataaggacgggccttgggatgtcattgtcattgggggcgggtattgtgggctgaccgcaacccgtgatttaaccgtcgcagggttcaagacgctgctgctggaggcccgtgatcgtattggtggccgctcctggagcagtaatattgacggttacccgtatgagatgggtggcacttgggttcattggcatcaatctcacgtgtggcgtgaaatcacgcgttataaaatgcacaacgcgctgtctaaatcatttaacttttcacgtggcgtgaatcacttccaactgcgtaccaatccgaccaccagtacgtacatgacgcacgaagcgctggctgaactgctgcgtagcgcattgcataaattcaccaatgtcgacggcactaatggccgtacagtgttgccgttcccacatgatatgttttatgtgccggaatttcgcaagtatgacgaaatgtcatattccgaacgcattgaccagatccgcgacgagctgtctttgaacgaacgctctagtttagaggctttcattttattatgtagcggtggcaccctggaaaactccagctttggtgaatttctgcattggtgggcaatgtcgggttacacgtatcagggctgtatggattgtttaatctcctataaatttaaggatggccagagtgcgttcgcgcgtcgcttctttgaagaagccgctggcactggccgtctgggctatgtctttggttgtccggtgcgttctgtggtggacgaacgcgacgcagtacgtgttaccgcacgtgacggtcgcgaattcgcagcgaaacgtttggtttgcacgattccgctgaacgtattgagttctgttcattttagcccaccactgtccccgcaacgcatggccgctgcgaacattggccatgttaaccagtgcgtcaaagtgcatgcggaagtcagttgcccggatatgcgttcatggtcgggtatctcctatccgttcaacaaattagcctacgctatcggcgatggcacgaccccagcgggtaatacgcatattgtgtgtcttggtggggcccataatcatatccagccggaagaggacgtggaagcaacgaagatggccgttgaaaacatgtcgcctgggaatatggatatcaaacgtctggtcttccacaactggtgcaaggatgaatttgccaaaggcgggtggttcttcgcccctccacagctgctgtcaaagagcctggatgaactgcgctgtcgtcacggtaatgtcctgtttgcaaactccgattgggccttaggttggcgtggttttatcgatggtgctatcgaggagggcacccgcgcagcggttactgtaattgaggaactgcgtcctgcgcctgcggtgcgttcccacctg

SEQ ID NO: 1014 - protein, 495 aa, synthetic construct
  REGION 1..495: note = Variant of monoamine oxidase
MTSRDGYQWTPETGLTQGVPSLGVISPPTNIEDTDKDGPWDVIVIGGGYCGLTATRDLTVAGFKTLLLEARDRIGGRSWSSNIDGYPYEMGGTWVHWHQSHVWREITRYKMHNALSKSFNFSRGVNHFQLRTNPTTSTYMTHEALAELLRSALHKFTNVDGTNGRTVLPFPHDMFYVPEFRKYDEMSYSERIDQIRDELSLNERSSLEAFILLCSGGTLENSSFGEFLHWWAMSGYTYQGCMDCLISYKFKDGQSAFARRFFEEAAGTGRLGYVFGCPVRSVVDERDAVRVTARDGREFAAKRLVCTIPLNVLSSVHFSPPLSPQRMAAANIGHVNQCVKVHAEVSCPDMRSWSGISYPFNKLAYAIGDGTTPAGNTHIVCLGGAHNHIQPEEDVEATKMAVENMSPGNMDIKRLVFHNWCKDEFAKGGWFFAPPQLLSKSLDELRCRHGNVLFANSDWALGWRGFIDGAIEEGTRAAVTVIEELRPAPAVRSHL

SEQ ID NO: 1015 - DNA, 1485 bp, synthetic construct
  misc_feature 1..1485: note = Variant of monoamine oxidase
  source 1..1485: mol_type = other DNA
atgaccagccgcgacggctatcagtggaccccggaaacgggtctgacccagggcgtaccgtccctgggtgtcatttcgccgccgactaacatcgaagataccgataaggacgggccttgggatgtcattgtcattgggggcgggtattgtgggctgaccgcaacccgtgatttaaccgtcgcagggttcaagacgctgctgctggaggcccgtgatcgtattggtggccgctcctggagcagtaatattgacggttacccgtatgagatgggtggcacttgggttcattggcatcaatctcacgtgtggcgtgaaatcacgcgttataaaatgcacaacgcgctgtctccatcatttaacttttcacgtggcgtgaatcacttccaactgcgtaccaatccgaccaccagtacgtacatgacgcacgaagcggaggatgaactgctgcgtagcgcattgcataaattcaccaatgtcgacggcactaatggccgtacagtgttgccgttcccacatgatatgttttatgtgccggaatttcgcaagtatgacgaaatgtcatattccgaacgcattgaccagatccgcgacgaactgtctttgaacgaacgctctagtttagaggctttcattttattatgtagcggtggcaccctggaaaactccagctttggtgaatttctgcattggtgggcaatgtcgggttacacgtatcagggctgtattgattgtttaatgtcctataaatttaaggatggccagagtgcgttcgcgcgtcgcttctgggaagaagccgctggcactggccgtctgggctatgtctttggttgtccggtgcgttctgtggtgaacgaacgcgacgcagtacgtgttaccgcacgtgacggtcgcgaattcgcagcgaaacgtttggtttgcacgattccgctgaacgtattgagttctgttcattttagcccaccactgtccccgcaacgcatggccgctgcgaacattggccatgttaaccagggcgtcaaagtgcatgcggaagtcagtaacccggatatgcgttcatggtcgggtatctcctatccgttcaacaaattagcctacgctatcggcgatggcacgaccccagcgggtaatacgcatattgtgtgccttgggggggcccataatcatatccagccggaagaggacgtggaagcaacgaagatggccgttgaaaacatgtcgcctgggaatatggatatcaaacgtctggtcttccacaactggtgcaaggatgaatttgccaaaggcgggtggttcttcgcccctccacagctgctgtcaaagagcctggatgaactgcgctgtcgtcacggtaatgtcctgtttgcaaactccgattgggccttaggttggcgtggttttatcgatggtgctatcgaggagggcacccgcgcagcggttactgtaattgaggaactgcgtcctgcgcctgcggtgcgttcccacctg

SEQ ID NO: 1016 - protein, 495 aa, synthetic construct
  REGION 1..495: note = Variant of monoamine oxidase
MTSRDGYQWTPETGLTQGVPSLGVISPPTNIEDTDKDGPWDVIVIGGGYCGLTATRDLTVAGFKTLLLEARDRIGGRSWSSNIDGYPYEMGGTWVHWHQSHVWREITRYKMHNALSPSFNFSRGVNHFQLRTNPTTSTYMTHEAEDELLRSALHKFTNVDGTNGRTVLPFPHDMFYVPEFRKYDEMSYSERIDQIRDELSLNERSSLEAFILLCSGGTLENSSFGEFLHWWAMSGYTYQGCIDCLMSYKFKDGQSAFARRFWEEAAGTGRLGYVFGCPVRSVVNERDAVRVTARDGREFAAKRLVCTIPLNVLSSVHFSPPLSPQRMAAANIGHVNQGVKVHAEVSNPDMRSWSGISYPFNKLAYAIGDGTTPAGNTHIVCLGGAHNHIQPEEDVEATKMAVENMSPGNMDIKRLVFHNWCKDEFAKGGWFFAPPQLLSKSLDELRCRHGNVLFANSDWALGWRGFIDGAIEEGTRAAVTVIEELRPAPAVRSHL

SEQ ID NO: 1017 - DNA, 1485 bp, synthetic construct
  misc_feature 1..1485: note = Variant of monoamine oxidase
  source 1..1485: mol_type = other DNA
atgaccagccgcgacggctatcagtggaccccggaaacgggtctgacccagggcgtaccgtccctgggtgtcatttcgccgccgactaacatcgaagataccgataaggacgggccttgggatgtcattgtcattgggggcgggtattgtgggctgaccgcaacccgtgatttaaccgtcgcagggttcaagacgctgctgctggaggcccgtgatcgtattggtggccgctcctggagcagtaatattgacggttacccgtatgagatgggtggcacttgggttcattggcatcaatctcacgtgtggcgtgaaatcacgcgttataaaatgcacggggcgctgtctccgtcatttaacttttcacgtggcgtgaatcacttccaactgcgtaccaatccgaccaccagtacgtacatgacgcacgaagcgctggctgaactgatgcgtagcgcattgcataaattcaccaatgtcgacggcactaatggccgtacagtgttgccgttcccacatgatatgttttatgtgccggaatttcgcaagtatgacgaaatgtcatattccgaacgcattgaccagatccgcgacgaactgtctttgaacgaacgctctagtttagaggctttcattttattatgtagcggtggcaccctggaaaactccagctttggtgaatttctgcattggtgggcaatgtcgggttacacgtatcagggctgtattgattgtttaatttcctataaatttaaggatggccagagtgcgttcgcgcgtcgcttctgggaagaagccgctggcactggccgtctgggctatgtctttggttgtccggtgcgttctgtggtgaacgaacgcgacgcagtacgtgttaccgcacgtgacggtcgcgaattcgcagcgaaacgtttggtttgcacgattccgctgaacgtattgagttctgttcattttagcccaccactgtccccgcaacgcatggccgctgcgaacattggccatgttaaccagtgcgtcaaagtgcatgcggaagtcagttgtccggatatgcgttcatggtcgggtatctcctatccgttcaacaaattagcctacgctatcggcgatggcacgaccccagcgggtaatacgcatattgtgtgtcttggtggggcccataatcatatccagccggaagaggacgtggaagcaacgaagatggccgttgaaaacatgtcgcctgggaatatggatatcaaacgtctggtcttccacaactggtgcaaggatgaatttgccaaaggcgggtggttcttcgcccctccacagctgctgtcaaagagcctggatgaactgcgcgctcgtcacggtaatgtcctgtttgcaaactccgattgggccttaggttggcgtggttttatcgatggtgctatcgaggagggcacccgcgcagcggttactgtaattgaggaactgcgtcctgcgcctgcggtgcgttcccacctg

SEQ ID NO: 1018 - protein, 495 aa, synthetic construct
  REGION 1..495: note = Variant of monoamine oxidase
MTSRDGYQWTPETGLTQGVPSLGVISPPTNIEDTDKDGPWDVIVIGGGYCGLTATRDLTVAGFKTLLLEARDRIGGRSWSSNIDGYPYEMGGTWVHWHQSHVWREITRYKMHGALSPSFNFSRGVNHFQLRTNPTTSTYMTHEALAELMRSALHKFTNVDGTNGRTVLPFPHDMFYVPEFRKYDEMSYSERIDQIRDELSLNERSSLEAFILLCSGGTLENSSFGEFLHWWAMSGYTYQGCIDCLISYKFKDGQSAFARRFWEEAAGTGRLGYVFGCPVRSVVNERDAVRVTARDGREFAAKRLVCTIPLNVLSSVHFSPPLSPQRMAAANIGHVNQCVKVHAEVSCPDMRSWSGISYPFNKLAYAIGDGTTPAGNTHIVCLGGAHNHIQPEEDVEATKMAVENMSPGNMDIKRLVFHNWCKDEFAKGGWFFAPPQLLSKSLDELRARHGNVLFANSDWALGWRGFIDGAIEEGTRAAVTVIEELRPAPAVRSHL

SEQ ID NO: 1019 - DNA, 1485 bp, synthetic construct
  misc_feature 1..1485: note = Variant of monoamine oxidase
  source 1..1485: mol_type = other DNA
atgaccagccgcgacggctatcagtggaccccggaaacgggtctgacccagggcgtaccgtccctgggtgtcatttcgccgccgactaacatcgaagataccgataaggacgggccttgggatgtcattgtcattgggggcgggtattgtgggctgaccgcaacccgtgatttaaccgtcgcagggttcaagacgctgctgctggaggcccgtgatcgtattggtggccgctcctggagcagtaatattgacggttacccgtatgagatgggtggcacttgggttcattggcatcaatctcacgtgtggcgtgaaatcacgcgttataaaatgcacaatgcgctgtctaaatcatttaacttttcacgtggcgtgaatcacttccaactgcgtaccaatccgaccaccagtacgtacatgacgcacgaagcggaggatgaactgctgcgtagcgcattgcataaattcaccaatgtcgacggcactaatggccgtacagtgttgccgttcccacatgatatgttttatgtgccggaatttcgcaagtatgacgaaatgtcatattccgaacgcattgaccagatccgcgacgacctgtctttgaacgaacgctctagtttagaggctttcattttattatgtagcggtggcaccctggaaaactccagctttggtgaatttctgcattggtgggcaatgtcgggttacacgtatcagggctgtatggattgtttaatttcctataaatttaaggatggccagagtgcgttcgcgcgtcgcttctttgaagaagccgctggcactggccgtctgggctatgtctttggttgtccggtgcgttctgtggtgaacgaacgcgacgcagtacgtgttaccgcacgtgacggtcgcgaattcgcagcgaaacgtttggtttgcacgattccgctgaacgtattgagttctgttcattttagcccaccactgtccccgcaacgcatggccgctgcgaacattggccatgttaaccagtgcgtcaaagtgcatgcggaagtcagttgtccggatatgcgttcatggtcgggtatctcctatccgttcaacaaattagcctacgctatcggcgatggcacgaccccagcgggtaatacgcatattgtgtgccttgggggggcccataatcatatccagccggaagaggacgtggaagcaacgaagatggccgttgaaaacatgtcgcctgggaatatggatatcaaacgtctggtcttccacaactggtgcaaggatgaatttgccaaaggcgggtggttcttcgcccctccacagctgctgtcaaagagcctggatgaactgcgctgtcgtcacggtaatgtcctgtttgcaaactccgattgggccttaggttggcgtggttttatcgatggtgctatcgaggagggcacccgcgcagcggttactgtaattgaggaactgcgtcctgcgcctgcggtgcgttcccacctg

SEQ ID NO: 1020 - protein, 495 aa, synthetic construct
  REGION 1..495: note = Variant of monoamine oxidase
MTSRDGYQWTPETGLTQGVPSLGVISPPTNIEDTDKDGPWDVIVIGGGYCGLTATRDLTVAGFKTLLLEARDRIGGRSWSSNIDGYPYEMGGTWVHWHQSHVWREITRYKMHNALSKSFNFSRGVNHFQLRTNPTTSTYMTHEAEDELLRSALHKFTNVDGTNGRTVLPFPHDMFYVPEFRKYDEMSYSERIDQIRDDLSLNERSSLEAFILLCSGGTLENSSFGEFLHWWAMSGYTYQGCMDCLISYKFKDGQSAFARRFFEEAAGTGRLGYVFGCPVRSVVNERDAVRVTARDGREFAAKRLVCTIPLNVLSSVHFSPPLSPQRMAAANIGHVNQCVKVHAEVSCPDMRSWSGISYPFNKLAYAIGDGTTPAGNTHIVCLGGAHNHIQPEEDVEATKMAVENMSPGNMDIKRLVFHNWCKDEFAKGGWFFAPPQLLSKSLDELRCRHGNVLFANSDWALGWRGFIDGAIEEGTRAAVTVIEELRPAPAVRSHL

SEQ ID NO: 1021 - DNA, 1485 bp, synthetic construct
  misc_feature 1..1485: note = Variant of monoamine oxidase
  source 1..1485: mol_type = other DNA
atgaccagccgcgacggctatcagtggaccccggaaacgggtctgacccagggcgtaccgtccctgggtgtcatttcgccgccgactaacatcgaagataccgataaggacgggccttgggatgtcattgtcattgggggcgggtattgtgggctgaccgcaacccgtgatttaaccgtcgcagggttcaagacgctgctgctggaggcccgtgatcgtattggtggccgctcctggagcagtaatattgacggttacccgtatgagatgggtggcacttgggttcattggcatcaatctcacgtgtggcgtgaaatcacgcgttataaaatgcacaatgcgctgtctaaatcatttaacttttcacgtggcgtgaatcacttccaactgcgtaccaatccgaccaccagtacgtacatgacgcacgaagcggaggatgaactgctgcgtagcgcattgcataaattcaccaatgtcgacggcactaatggccgtacagtgttgccgttcccacatgatatgttttatgtgccggaatttcgcaagtatgacgaaatgtcatattccgaacgcattgaccagatccgcgacgaactgtctttgaacgaacgctctagtttagaggctttcattttattatgtagcggtggcaccctggaaaactccagctttggtgaatttctgcattggtgggcaatgtcgggttacacgtatcagggctgtatggattgtttaatgtcctataaatttaaggatggccagagtgcgttcgcgcgtagcttctttgaagaagccgctggcactggccgtctgggctatgtctttggttgtccggtgcgttctgtggtgaacgaacgcgacgcagtacgtgttaccgcacgtgacggtcgcgaattcgcagcgaaacgtttggtttgcacgattccgctgaacgtattgagttctgttcattttagcccaccactgtccccgcaacgcatggccgctgcgaacattggccatgttaaccagtgcgtcaaagtgcatgcggaagtcagttgtccggatatgcgttcatggtcgggtatctcctatccgttcaacaaattagcctacgctatcggcgatggcacgaccccagcgggtaatacgcatattgtggctcttggtggggcccataatcatatccagccggaagaggacgtggaagcaacgaagatggccgttgaaaacatgtcgcctgggaatatggatatcaaacgtctggtcttccacaactggtgcaaggatgaatttgccaaaggcgggtggttcttcgcccctccacagctgctgtcaaagagcctggatgaactgcgctgccgtcacggtaatgtcctgtttgcaaactccgattgggccttaggttggcgtggttttatcgatggtgctatcgaggagggcacccgcgcagcggttactgtaattgaggaactgcgtcctgcgcctgcggtgcgttcccacctg

SEQ ID NO: 1022 - protein, 495 aa, synthetic construct
  REGION 1..495: note = Variant of monoamine oxidase
MTSRDGYQWTPETGLTQGVPSLGVISPPTNIEDTDKDGPWDVIVIGGGYCGLTATRDLTVAGFKTLLLEARDRIGGRSWSSNIDGYPYEMGGTWVHWHQSHVWREITRYKMHNALSKSFNFSRGVNHFQLRTNPTTSTYMTHEAEDELLRSALHKFTNVDGTNGRTVLPFPHDMFYVPEFRKYDEMSYSERIDQIRDELSLNERSSLEAFILLCSGGTLENSSFGEFLHWWAMSGYTYQGCMDCLMSYKFKDGQSAFARSFFEEAAGTGRLGYVFGCPVRSVVNERDAVRVTARDGREFAAKRLVCTIPLNVLSSVHFSPPLSPQRMAAANIGHVNQCVKVHAEVSCPDMRSWSGISYPFNKLAYAIGDGTTPAGNTHIVALGGAHNHIQPEEDVEATKMAVENMSPGNMDIKRLVFHNWCKDEFAKGGWFFAPPQLLSKSLDELRCRHGNVLFANSDWALGWRGFIDGAIEEGTRAAVTVIEELRPAPAVRSHL

SEQ ID NO: 1023 - DNA, 1485 bp, synthetic construct
  misc_feature 1..1485: note = Variant of monoamine oxidase
  source 1..1485: mol_type = other DNA
atgaccagccgcgacggctatcagtggaccccggaaacgggtctgacccagggcgtaccgtccctgggtgtcatttcgccgccgactaacatcgaagataccgataaggacgggccttgggatgtcattgtcattgggggcgggtattgtgggctgaccgcaacccgtgatttaaccgtcgcagggttcaagacgctgctgctggaggcccgtgatcgtattggtggccgctcctggagcagtaatattgacggttacccgtatgagatgggtggcacttgggttcattggcatcaatctcacgtgtggcgtgaaatcacgcgttataaaatgcacaatgcgctgtctaaatcatttaacttttcacgtggcgtgaatcacttccaactgcgtaccaatccgaccaccagtacgtacatgacgcacgaagcggaggatgaactgctgcgtagcgcattgcataaattcaccaatgtcgacggcactaatggccgtacagtgttgccgttcccacatgatatgttttatgtgccggaatttcgcaagtatgacgaaatgtcatattccgaacgcattgaccagatccgcgacgaactgtctttgaacgaacgctctagtttagaggctttcattttattatgtagcggtggcaccctggaaaactccagctttggtgaatttctgcattggtgggcaatgtcgggttacacgtatcagggctgtattgattgtttaatgtcctataaatttaaggatggccagagtgcgttcgcgcgtagcttctgggaagaagccctgggcactggccgtctgggctatgtctttggttgtccggtgcgttctgtggtggacgaacgcgacgcagtacgtgttaccgcacgtgacggtcgcgaattcgcagcgaaacgtttggtttgcacgattccgctgaacgtattgagttctgttcattttagcccaccactgtccccgcaacgcatggccgctgcgaacattggccatgttaaccagtgcgtcaaagtgcatgcggaagtcagttgtccggatatgcgttcatggtcgggtatctcctatccgttcaacaaattagcctacgctatcggcgatggcacgaccccagcgggtaatacgcatattgtggctcttggtggggcccataatcatatccagccggaagaggacgtggaagcaacgaagatggccgttgaaaacatgtcgcctgggaatatggatatcaaacgtctggtcttccacaactggtgcaaggatgaatttgccaaaggcgggtggttcttcgcccctccacagctgctgtcaaagagcctggatgaactgcgctgccgtcacggtaatgtcctgtttgcaaactccgattgggccttaggttggcgtggttttatcgatggtgctatcgaggagggcacccgcgcagcggttactgtaattgaggaactgcgtcctgcgcctgcggtgcgttcccacctg

SEQ ID NO: 1024 - protein, 495 aa, synthetic construct
  REGION 1..495: note = Variant of monoamine oxidase
MTSRDGYQWTPETGLTQGVPSLGVISPPTNIEDTDKDGPWDVIVIGGGYCGLTATRDLTVAGFKTLLLEARDRIGGRSWSSNIDGYPYEMGGTWVHWHQSHVWREITRYKMHNALSKSFNFSRGVNHFQLRTNPTTSTYMTHEAEDELLRSALHKFTNVDGTNGRTVLPFPHDMFYVPEFRKYDEMSYSERIDQIRDELSLNERSSLEAFILLCSGGTLENSSFGEFLHWWAMSGYTYQGCIDCLMSYKFKDGQSAFARSFWEEALGTGRLGYVFGCPVRSVVDERDAVRVTARDGREFAAKRLVCTIPLNVLSSVHFSPPLSPQRMAAANIGHVNQCVKVHAEVSCPDMRSWSGISYPFNKLAYAIGDGTTPAGNTHIVALGGAHNHIQPEEDVEATKMAVENMSPGNMDIKRLVFHNWCKDEFAKGGWFFAPPQLLSKSLDELRCRHGNVLFANSDWALGWRGFIDGAIEEGTRAAVTVIEELRPAPAVRSHL

SEQ ID NO: 1025 - DNA, 1485 bp, synthetic construct
  misc_feature 1..1485: note = Variant of monoamine oxidase
  source 1..1485: mol_type = other DNA
atgaccagccgcgacggctatcagtggaccccggaaacgggtctgacccagggcgtaccgtccctgggtgtcatttcgccgccgactaacatcgaagataccgataaggacgggccttgggatgtcattgtcattgggggcgggtattgtgggctgaccgcaacccgtgatttaaccgtcgcagggttcaagacgctgctgctggaggcccgtgatcgtattggtggccgctcctggagcagtaatattgacggttacccgtatgagatgggtggcacttgggttcattggcatcaatctcacgtgtggcgtgaaatcacgcgttataaaatgcacaacgcgctgtctccatcatttaacttttcacgtggcgtgaatcacttccaactgcgtaccaatccgaccaccagtacgtacatgacgcacgaagcgctggctgaactgctgcgtagcgcattgcataaattcaccaatgtcgacggcactaatggccgtacagtgttgccgttcccacatgatatgttttatgtgccggaatttcgcaagtatgacgaaatgtcatattccgaacgcattgaccagatccgcgacgaactgtctttgaacgaacgctctagtttagaggctttcattttattatgtagcggtggcaccctggaaaactccagctttggtgaatttctgcattggtgggcaatgtcgggttacacgtatcagggctgtattgattgtttaatttcctataaatttaaggatggccagagtgcgttcgcgcgtagcttctttgaagaagccgctggcactggccgtctgggctatgtctttggttgtccggtgcgttctgtggtgaacgaacgcgacgcagtacgtgttaccgcacgtgacggtcgcgaattcgcagcgaaacgtttggtttgcacgattccgctgaacgtattgagttctgttcattttagcccaccactgtccccgcaacgcatggccgctgcgaacattggccatgttaaccagggcgtcaaagtgcatgcggaagtcagtaacccggatatgcgttcatggtcgggtatctcctatccgttcaacaaattagcctacgctatcggcgatggcacgaccccagcgggtaatacgcatattgtgtgtcttggtggggcccataatcatatccagccggaagaggacgtggaagcaacgaagatggccgttgaaaacatgtcgcctgggaatatggatatcaaacgtctggtcttccacaactggtgcaaggatgaatttgccaaaggcgggtggttcttcgcccctccacagctgctgtcaaagagcctggatgaactgcgcgctcgtcacggtaatgtcctgtttgcaaactccgattgggccttaggttggcgtggttttatcgatggtgctatcgaggagggcacccgcgcagcggttactgtaattgaggaactgcgtcctgcgcctgcggtgcgttcccacctg

SEQ ID NO: 1026 - protein, 495 aa, synthetic construct
  REGION 1..495: note = Variant of monoamine oxidase
MTSRDGYQWTPETGLTQGVPSLGVISPPTNIEDTDKDGPWDVIVIGGGYCGLTATRDLTVAGFKTLLLEARDRIGGRSWSSNIDGYPYEMGGTWVHWHQSHVWREITRYKMHNALSPSFNFSRGVNHFQLRTNPTTSTYMTHEALAELLRSALHKFTNVDGTNGRTVLPFPHDMFYVPEFRKYDEMSYSERIDQIRDELSLNERSSLEAFILLCSGGTLENSSFGEFLHWWAMSGYTYQGCIDCLISYKFKDGQSAFARSFFEEAAGTGRLGYVFGCPVRSVVNERDAVRVTARDGREFAAKRLVCTIPLNVLSSVHFSPPLSPQRMAAANIGHVNQGVKVHAEVSNPDMRSWSGISYPFNKLAYAIGDGTTPAGNTHIVCLGGAHNHIQPEEDVEATKMAVENMSPGNMDIKRLVFHNWCKDEFAKGGWFFAPPQLLSKSLDELRARHGNVLFANSDWALGWRGFIDGAIEEGTRAAVTVIEELRPAPAVRSHL

SEQ ID NO: 1027 - DNA, 1485 bp, synthetic construct
  misc_feature 1..1485: note = Variant of monoamine oxidase
  source 1..1485: mol_type = other DNA
atgaccagccgcgacggctatcagtggaccccggaaacgggtctgacccagggcgtaccgtccctgggtgtcatttcgccgccgactaacatcgaagataccgataaggacgggccttgggatgtcattgtcattgggggcgggtattgtgggctgaccgcaacccgtgatttaaccgtcgcagggttcaagacgctgctgctggaggcccgtgatcgtattggtggccgctcctggagcagtaatattgacggttacccgtatgagatgggtggcacttgggttcattggcatcaatctcacgtgtggcgtgaaatcacgcgttataaaatgcacaacgcgctgtctccgtcatttaacttttcacgtggcgtgaatcacttccaactgcgtaccaatccgaccaccagtacgtacatgacgcacgaagcgctggctgaactgatgcgtagcgcattgcataaattcaccaatgtcgacggcactaatggccgtacagtgttgccgttcccacatgatatgttttatgtgccggaatttcgcaagtatgacgaaatgtcatattccgaacgcattgaccagatccgcgacgaactgtctttgaacgaacgctctagtttagaggctttcattttattatgtagcggtggcaccctggaaaactccagctttggtgaatttctgcattggtgggcaatgtcgggttacacgtatcagggctgtatggattgtttaatctcctataaatttaaggatggccagagtgcgttcgcgcgtagcttctttgaagaagccgctggcactggccgtctgggctatgtctttggttgtccggtgcgttctgtggtgaacgaacgcgacgcagtacgtgttaccgcacgtgacggtcgcgaattcgcagcgaaacgtttggtttgcacgattccgctgaacgtattgagttctgttcattttagcccaccactgtccccgcaacgcatggccgctgcgaacattggccatgttaaccagggcgtcaaagtgcatgcggaagtcagtaacccggatatgcgttcatggtcgggtatctcctatccgttcaacaaattagcctacgctatcggcgatggcacgaccccagcgggtaatacgcatattgtgtgccttgggggggcccataatcatatccagccggaagaggacgtggaagcaacgaagatggccgttgaaaacatgtcgcctgggaatatggatatcaaacgtctggtcttccacaactggtgcaaggatgaatttgccaaaggcgggtggttcttcgcccctccacagctgctgtcaaagagcctggatgaactgcgctgtcgtcacggtaatgtcctgtttgcaaactccgattgggccttaggttggcgtggttttatcgatggtgctatcgaggagggcacccgcgcagcggttactgtaattgaggaactgcgtcctgcgcctgcggtgcgttcccacctg

SEQ ID NO: 1028 - protein, 495 aa, synthetic construct
  REGION 1..495: note = Variant of monoamine oxidase
MTSRDGYQWTPETGLTQGVPSLGVISPPTNIEDTDKDGPWDVIVIGGGYCGLTATRDLTVAGFKTLLLEARDRIGGRSWSSNIDGYPYEMGGTWVHWHQSHVWREITRYKMHNALSPSFNFSRGVNHFQLRTNPTTSTYMTHEALAELMRSALHKFTNVDGTNGRTVLPFPHDMFYVPEFRKYDEMSYSERIDQIRDELSLNERSSLEAFILLCSGGTLENSSFGEFLHWWAMSGYTYQGCMDCLISYKFKDGQSAFARSFFEEAAGTGRLGYVFGCPVRSVVNERDAVRVTARDGREFAAKRLVCTIPLNVLSSVHFSPPLSPQRMAAANIGHVNQGVKVHAEVSNPDMRSWSGISYPFNKLAYAIGDGTTPAGNTHIVCLGGAHNHIQPEEDVEATKMAVENMSPGNMDIKRLVFHNWCKDEFAKGGWFFAPPQLLSKSLDELRCRHGNVLFANSDWALGWRGFIDGAIEEGTRAAVTVIEELRPAPAVRSHL

SEQ ID NO: 1029 - DNA, 1485 bp, synthetic construct
  misc_feature 1..1485: note = Variant of monoamine oxidase
  source 1..1485: mol_type = other DNA
atgaccagccgcgacggctatcagtggaccccggaaacgggtctgacccagggcgtaccgtccctgggtgtcatttcgccgccgactaacatcgaagataccgataaggacgggccttgggatgtcattgtcattgggggcgggtattgtgggctgaccgcaacccgtgatttaaccgtcgcagggttcaagacgctgctgctggaggcccgtgatcgtattggtggccgctcctggagcagtaatattgacggttacccgtatgagatgggtggcacttgggttcattggcatcaatctcacgtgtggcgtgaaatcacgcgttataaaatgcacaatgcgctgtctaaatcatttaacttttcacgtggcgtgaatcacttccaactgcgtaccaatccgaccaccagtacgtacatgacgcacgaagcggaggatgaactgctgcgtagcgcattgcataaattcaccaatgtcgacggcactaatggccgtacagtgttgccgttcccacatgatatgttttatgtgccggaatttcgcaagtatgacgaaatgtcatattccgaacgcattgaccagatccgcgacgacctgtctttgaacgaacgctctagtttagaggctttcattttattatgtagcggtggcaccctggaaaactccagctttggtgaatttctgcattggtgggcaatgtcgggttacacgtatcagggctgtatggattgtttaatctcctataaatttaaggatggccagagtgcgttcgcgcgtcgcttctgggaagaagccgctggcactggccgtctgggctatgtctttggttgtccggtgcgttctgtggtgaacgaacgcgacgcagtacgtgttaccgcacgtgacggtcgcgaattcgcagcgaaacgtttggtttgcacgattccgctgaacgtattgagttctgttcattttagcccaccactgtccccgcaacgcatggccgctgcgaacattggccatgttaaccagtgcgtcaaagtgcatgcggaagtcagttgcccggatatgcgttcatggtcgggtatctcctatccgttcaacaaattagcctacgctatcggcgatggcacgaccccagcgggtaatacgcatattgtgtgccttgggggggcccataatcatatccagccggaagaggacgtggaagcaacgaagatggccgttgaaaacatgtcgcctgggaatatggatatcaaacgtctggtcttccacaactggtgcaaggatgaatttgccaaaggcgggtggttcttcgcccctccacagctgctgtcaaagagcctggatgaactgcgctgccgtcacggtaatgtcctgtttgcaaactccgattgggccttaggttggcgtggttttatcgatggtgctatcgaggagggcacccgcgcagcggttactgtaattgaggaactgcgtcctgcgcctgcggtgcgttcccacctg

SEQ ID NO: 1030 - protein, 495 aa, synthetic construct
  REGION 1..495: note = Variant of monoamine oxidase
MTSRDGYQWTPETGLTQGVPSLGVISPPTNIEDTDKDGPWDVIVIGGGYCGLTATRDLTVAGFKTLLLEARDRIGGRSWSSNIDGYPYEMGGTWVHWHQSHVWREITRYKMHNALSKSFNFSRGVNHFQLRTNPTTSTYMTHEAEDELLRSALHKFTNVDGTNGRTVLPFPHDMFYVPEFRKYDEMSYSERIDQIRDDLSLNERSSLEAFILLCSGGTLENSSFGEFLHWWAMSGYTYQGCMDCLISYKFKDGQSAFARRFWEEAAGTGRLGYVFGCPVRSVVNERDAVRVTARDGREFAAKRLVCTIPLNVLSSVHFSPPLSPQRMAAANIGHVNQCVKVHAEVSCPDMRSWSGISYPFNKLAYAIGDGTTPAGNTHIVCLGGAHNHIQPEEDVEATKMAVENMSPGNMDIKRLVFHNWCKDEFAKGGWFFAPPQLLSKSLDELRCRHGNVLFANSDWALGWRGFIDGAIEEGTRAAVTVIEELRPAPAVRSHL

SEQ ID NO: 1031 - DNA, 1485 bp, synthetic construct
  misc_feature 1..1485: note = Variant of monoamine oxidase
  source 1..1485: mol_type = other DNA
atgaccagccgcgacggctatcagtggaccccggaaacgggtctgacccagggcgtaccgtccctgggtgtcatttcgccgccgactaacatcgaagataccgataaggacgggccttgggatgtcattgtcattgggggcgggtattgtgggctgaccgcaacccgtgatttaaccgtcgcagggttcaagacgctgctgctggaggcccgtgatcgtattggtggccgctcctggagcagtaatattgacggttacccgtatgagatgggtggcacttgggttcattggcatcaatctcacgtgtggcgtgaaatcacgcgttataaaatgcacaatgcgctgtctaaatcatttaacttttcacgtggcgtgaatcacttccaactgcgtaccaatccgaccaccagtacgtacatgacgcacgaagcggaggatgaactgctgcgtagcgcattgcataaattcaccaatgtcgacggcactaatggccgtacagtgttgccgttcccacatgatatgttttatgtgccggaatttcgcaagtatgacgaaatgtcatattccgaacgcattgaccagatccgcgacgaactgtctttgaacgaacgctctagtttagaggctttcattttattatgtagcggtggcaccctggaaaactccagctttggtgaatttctgcattggtgggcaatgtcgggttacacgtatcagggctgtatggattgtttaatgtcctataaatttaaggatggccagagtgcgttcgcgcgtcgcttctgggaagaagccgctggcactggccgtctgggctatgtctttggttgtccggtgcgttctgtggtggacgaacgcgacgcagtacgtgttaccgcacgtgacggtcgcgaattcgcagcgaaacgtttggtttgcacgattccgctgaacgtattgagttctgttcattttagcccaccactgtccccgcaacgcatggccgctgcgaacattggccatgttaaccagtgcgtcaaagtgcatgcggaagtcagttgcccggatatgcgttcatggtcgggtatctcctatccgttcaacaaattagcctacgctatcggcgatggcacgaccccagcgggtaatacgcatattgtgtgccttgggggggcccataatcatatccagccggaagaggacgtggaagcaacgaagatggccgttgaaaacatgtcgcctgggaatatggatatcaaacgtctggtcttccacaactggtgcaaggatgaatttgccaaaggcgggtggttcttcgcccctccacagctgctgtcaaagagcctggatgaactgcgctgccgtcacggtaatgtcctgtttgcaaactccgattgggccttaggttggcgtggttttatcgatggtgctatcgaggagggcacccgcgcagcggttactgtaattgaggaactgcgtcctgcgcctgcggtgcgttcccacctg

SEQ ID NO: 1032 - protein, 495 aa, synthetic construct
  REGION 1..495: note = Variant of monoamine oxidase
MTSRDGYQWTPETGLTQGVPSLGVISPPTNIEDTDKDGPWDVIVIGGGYCGLTATRDLTVAGFKTLLLEARDRIGGRSWSSNIDGYPYEMGGTWVHWHQSHVWREITRYKMHNALSKSFNFSRGVNHFQLRTNPTTSTYMTHEAEDELLRSALHKFTNVDGTNGRTVLPFPHDMFYVPEFRKYDEMSYSERIDQIRDELSLNERSSLEAFILLCSGGTLENSSFGEFLHWWAMSGYTYQGCMDCLMSYKFKDGQSAFARRFWEEAAGTGRLGYVFGCPVRSVVDERDAVRVTARDGREFAAKRLVCTIPLNVLSSVHFSPPLSPQRMAAANIGHVNQCVKVHAEVSCPDMRSWSGISYPFNKLAYAIGDGTTPAGNTHIVCLGGAHNHIQPEEDVEATKMAVENMSPGNMDIKRLVFHNWCKDEFAKGGWFFAPPQLLSKSLDELRCRHGNVLFANSDWALGWRGFIDGAIEEGTRAAVTVIEELRPAPAVRSHL

SEQ ID NO: 1033 - DNA, 1485 bp, synthetic construct
  misc_feature 1..1485: note = Variant of monoamine oxidase
  source 1..1485: mol_type = other DNA
atgaccagccgcgacggctatcagtggaccccggaaacgggtctgacccagggcgtaccgtccctgggtgtcatttcgccgccgactaacatcgaagataccgataaggacgggccttgggatgtcattgtcattgggggcgggtattgtgggctgaccgcaacccgtgatttaaccgtcgcagggttcaagacgctgctgctggaggcccgtgatcgtattggtggccgctcctggagcagtaatattgacggttacccgtatgagatgggtggcacttgggttcattggcatcaatctcacgtgtggcgtgaaatcacgcgttataaaatgcacggggcgctgtctccgtcatttaacttttcacgtggcgtgaatcacttccaactgcgtaccaatccgaccaccagtacgtacatgacgcacgaagcggaggatgaactgctgcgtagcgcattgcataaattcaccaatgtcgacggcactaatggccgtacagtgttgccgttcccacatgatatgttttatgtgccggaatttcgcaagtatgacgaaatgtcatattccgaacgcattgaccagatccgcgacgaactgtctttgaacgaacgctctagtttagaggctttcattttattatgtagcggtggcaccctggaaaactccagctttggtgaatttctgcattggtgggcaatgtcgggttacacgtatcagggctgtattgattgtttaatttcctataaatttaaggatggccagagtgcgttcgcgcgtcgcttctgggaagaagccgctggcactggccgtctgggctatgtctttggttgtccggtgcgttctgtggtgaacgaacgcgacgcagtacgtgttaccgcacgtgacggtcgcgaattcgcagcgaaacgtttggtttgcacgattccgctgaacgtattgagttctgttcattttagcccaccactgtccccgcaacgcatggccgctgcgaacattggccatgttaaccagtgcgtcaaagtgcatgcggaagtcagtaacccggatatgcgttcatggtcgggtatctcctatccgttcaacaaattagcctacgctatcggcgatggcacgaccccagcgggtaatacgcatattgtgtgccttgggggggcccataatcatatccagccggaagaggacgtggaagcaacgaagatggccgttgaaaacatgtcgcctgggaatatggatatcaaacgtctggtcttccacaactggtgcaaggatgaatttgccaaaggcgggtggttcttcgcccctccacagctgctgtcaaagagcctggatgaactgcgctgccgtcacggtaatgtcctgtttgcaaactccgattgggccttaggttggcgtggttttatcgatggtgctatcgaggagggcacccgcgcagcggttactgtaattgaggaactgcgtcctgcgcctgcggtgcgttcccacctg

SEQ ID NO: 1034 - protein, 495 aa, synthetic construct
  REGION 1..495: note = Variant of monoamine oxidase
MTSRDGYQWTPETGLTQGVPSLGVISPPTNIEDTDKDGPWDVIVIGGGYCGLTATRDLTVAGFKTLLLEARDRIGGRSWSSNIDGYPYEMGGTWVHWHQSHVWREITRYKMHGALSPSFNFSRGVNHFQLRTNPTTSTYMTHEAEDELLRSALHKFTNVDGTNGRTVLPFPHDMFYVPEFRKYDEMSYSERIDQIRDELSLNERSSLEAFILLCSGGTLENSSFGEFLHWWAMSGYTYQGCIDCLISYKFKDGQSAFARRFWEEAAGTGRLGYVFGCPVRSVVNERDAVRVTARDGREFAAKRLVCTIPLNVLSSVHFSPPLSPQRMAAANIGHVNQCVKVHAEVSNPDMRSWSGISYPFNKLAYAIGDGTTPAGNTHIVCLGGAHNHIQPEEDVEATKMAVENMSPGNMDIKRLVFHNWCKDEFAKGGWFFAPPQLLSKSLDELRCRHGNVLFANSDWALGWRGFIDGAIEEGTRAAVTVIEELRPAPAVRSHL

SEQ ID NO: 1035 - DNA, 1485 bp, synthetic construct
  misc_feature 1..1485: note = Variant of monoamine oxidase
  source 1..1485: mol_type = other DNA
atgaccagccgcgacggctatcagtggaccccggaaacgggtctgacccagggcgtaccgtccctgggtgtcatttcgccgccgactaacatcgaagataccgataaggacgggccttgggatgtcattgtcattgggggcgggtattgtgggctgaccgcaacccgtgatttaaccgtcgcagggttcaagacgctgctgctggaggcccgtgatcgtattggtggccgctcctggagcagtaatattgacggttacccgtatgagatgggtggcacttgggttcattggcatcaatctcacgtgtggcgtgaaatcacgcgttataaaatgcacaacgcgctgtctccatcatttaacttttcacgtggcgtgaatcacttccaactgcgtaccaatccgaccaccagtacgtacatgacgcacgaagcggaggatgaactgctgcgtagcgcattgcataaattcaccaatgtcgacggcactaatggccgtacagtgttgccgttcccacatgatatgttttatgtgccggaatttcgcaagtatgacgaaatgtcatattccgaacgcattgaccagatccgcgacgaactgtctttgaacgaacgctctagtttagaggctttcattttattatgtagcggtggcaccctggaaaactccagctttggtgaatttctgcattggtgggcaatgtcgggttacacgtatcagggctgtatggattgtttaatctcctataaatttaaggatggccagagtgcgttcgcgcgtcgcttctgggaagaagccgctggcactggccgtctgggctatgtctttggttgtccggtgcgttctgtggtgaacgaacgcgacgcagtacgtgttaccgcacgtgacggtcgcgaattcgcagcgaaacgtttggtttgcacgattccgctgaacgtattgagttctgttcattttagcccaccactgtccccgcaacgcatggccgctgcgaacattggccatgttaaccagtgcgtcaaagtgcatgcggaagtcagtaacccggatatgcgttcatggtcgggtatctcctatccgttcaacaaattagcctacgctatcggcgatggcacgaccccagcgggtaatacgcatattgtggctcttggtggggcccataatcatatccagccggaagaggacgtggaagcaacgaagatggccgttgaaaacatgtcgcctgggaatatggatatcaaacgtctggtcttccacaactggtgcaaggatgaatttgccaaaggcgggtggttcttcgcccctccacagctgctgtcaaagagcctggatgaactgcgctgtcgtcacggtaatgtcctgtttgcaaactccgattgggccttaggttggcgtggttttatcgatggtgctatcgaggagggcacccgcgcagcggttactgtaattgaggaactgcgtcctgcgcctgcggtgcgttcccacctg

SEQ ID NO: 1036 - protein, 495 aa, synthetic construct
  REGION 1..495: note = Variant of monoamine oxidase
MTSRDGYQWTPETGLTQGVPSLGVISPPTNIEDTDKDGPWDVIVIGGGYCGLTATRDLTVAGFKTLLLEARDRIGGRSWSSNIDGYPYEMGGTWVHWHQSHVWREITRYKMHNALSPSFNFSRGVNHFQLRTNPTTSTYMTHEAEDELLRSALHKFTNVDGTNGRTVLPFPHDMFYVPEFRKYDEMSYSERIDQIRDELSLNERSSLEAFILLCSGGTLENSSFGEFLHWWAMSGYTYQGCMDCLISYKFKDGQSAFARRFWEEAAGTGRLGYVFGCPVRSVVNERDAVRVTARDGREFAAKRLVCTIPLNVLSSVHFSPPLSPQRMAAANIGHVNQCVKVHAEVSNPDMRSWSGISYPFNKLAYAIGDGTTPAGNTHIVALGGAHNHIQPEEDVEATKMAVENMSPGNMDIKRLVFHNWCKDEFAKGGWFFAPPQLLSKSLDELRCRHGNVLFANSDWALGWRGFIDGAIEEGTRAAVTVIEELRPAPAVRSHL

SEQ ID NO: 1037 - DNA, 1485 bp, synthetic construct
  misc_feature 1..1485: note = Variant of monoamine oxidase
  source 1..1485: mol_type = other DNA
atgaccagccgcgacggctatcagtggaccccggaaacgggtctgacccagggcgtaccgtccctgggtgtcatttcgccgccgactaacatcgaagataccgataaggacgggccttgggatgtcattgtcattgggggcgggtattgtgggctgaccgcaacccgtgatttaaccgtcgcagggttcaagacgctgctgctggaggcccgtgatcgtattggtggccgctcctggagcagtaatattgacggttacccgtatgagatgggtggcacttgggttcattggcatcaatctcacgtgtggcgtgaaatcacgcgttataaaatgcacaatgcgctgtctaaatcatttaacttttcacgtggcgtgaatcacttccaactgcgtaccaatccgaccaccagtacgtacatgacgcacgaagcggaggatgaactgctgcgtagcgcattgcataaattcaccaatgtcgacggcactaatggccgtacagtgttgccgttcccacatgatatgttttatgtgccggaatttcgcaagtatgacgaaatgtcatattccgaacgcattgaccagatccgcgacgaactgtctttgaacgaacgctctagtttagaggctttcattttattatgtagcggtggcaccctggaaaactccagctttggtgaatttctgcattggtgggcaatgtcgggttacacgtatcagggctgtattgattgtttaatttcctataaatttaaggatggccagagtgcgttcgcgcgtagcttctttgaagaagccgctggcactggccgtctgggctatgtctttggttgtccggtgcgttctgtggtgaacgaacgcgacgcagtacgtgttaccgcacgtgacggtcgcgaattcgcagcgaaacgtttggtttgcacgattccgctgaacgtattgagttctgttcattttagcccaccactgtccccgcaacgcatggccgctgcgaacattggccatgttaaccagtgcgtcaaagtgcatgcggaagtcagttgtccggatatgcgttcatggtcgggtatctcctatccgttcaacaaattagcctacgctatcggcgatggcacgaccccagcgggtaatacgcatattgtgtgtcttggtggggcccataatcatatccagccggaagaggacgtggaagcaacgaagatggccgttgaaaacatgtcgcctgggaatatggatatcaaacgtctggtcttccacaactggtgcaaggatgaatttgccaaaggcgggtggttcttcgcccctccacagctgctgtcaaagagcctggatgaactgcgctgccgtcacggtaatgtcctgtttgcaaactccgattgggccttaggttggcgtggttttatcgatggtgctatcgaggagggcacccgcgcagcggttactgtaattgaggaactgcgtcctgcgcctgcggtgcgttcccacctg

SEQ ID NO: 1038 - protein, 495 aa, synthetic construct
  REGION 1..495: note = Variant of monoamine oxidase
MTSRDGYQWTPETGLTQGVPSLGVISPPTNIEDTDKDGPWDVIVIGGGYCGLTATRDLTVAGFKTLLLEARDRIGGRSWSSNIDGYPYEMGGTWVHWHQSHVWREITRYKMHNALSKSFNFSRGVNHFQLRTNPTTSTYMTHEAEDELLRSALHKFTNVDGTNGRTVLPFPHDMFYVPEFRKYDEMSYSERIDQIRDELSLNERSSLEAFILLCSGGTLENSSFGEFLHWWAMSGYTYQGCIDCLISYKFKDGQSAFARSFFEEAAGTGRLGYVFGCPVRSVVNERDAVRVTARDGREFAAKRLVCTIPLNVLSSVHFSPPLSPQRMAAANIGHVNQCVKVHAEVSCPDMRSWSGISYPFNKLAYAIGDGTTPAGNTHIVCLGGAHNHIQPEEDVEATKMAVENMSPGNMDIKRLVFHNWCKDEFAKGGWFFAPPQLLSKSLDELRCRHGNVLFANSDWALGWRGFIDGAIEEGTRAAVTVIEELRPAPAVRSHL

SEQ ID NO: 1039 - DNA, 1485 bp, synthetic construct
  misc_feature 1..1485: note = Variant of monoamine oxidase
  source 1..1485: mol_type = other DNA
atgaccagccgcgacggctatcagtggaccccggaaacgggtctgacccagggcgtaccgtccctgggtgtcatttcgccgccgactaacatcgaagataccgataaggacgggccttgggatgtcattgtcattgggggcgggtattgtgggctgaccgcaacccgtgatttaaccgtcgcagggttcaagacgctgctgctggaggcccgtgatcgtattggtggccgctcctggagcagtaatattgacggttacgggtatgagatgggtggcacttgggttcattggcatcaatctcacgtgtggcgtgaaatcacgcgttataaaatgcacggggcgctgtctccgtcatttaacttttcacgtggcgtgaatcacttccaactgcgtaccaatccgaccaccagtacgtacatgacgcacgaagcgctggatgaactgctgcgtagcgcattgcataaattcaccaatgtcgacggcactaatggccgtacagtgttgccgttcccacatgatatgttttatgtgccggaatttcgcaagtatgacgaaatgtcatattccgaacgcattgaccagatccgcgacgacctgtctttgaacgaacgctctagtttagaggctttcattttattatgtagcggtggcaccctggaaaactccagctttggtgaatttctgcattggtgggcaatgtcgggttacacgtatcagggctgtattgattgtttaatgtcctataaatttaaggatggccagagtgcgttcgcgcgtcgcttctttgaagaagccctgggcactggccgtctgggctatgtctttggttgtccggtgcgttctgtggtgaacgaacgcgacgcagtacgtgttaccgcacgtgacggtcgcgaattcgcagcgaaacgtttggtttgcacgattccgctgaacgtattgagttctgttcattttagcccaccactgtccccgcaacgcatggccgctgcgaacattggccatgttaaccagtgcgtcaaagtgcatgcggaagtcagttgcccggatatgcgttcatggtcgggtatctcctatccgttcaacaaattagcctacgctatcggcgatggcacgaccccagcgggtaatacgcatattgtgtgccttgggggggcccataatcatatccagccggaagaggacgtggaagcaacgaagatggccgttgaaaacatgtcgcctgggaatatggatatcaaacgtctggtcttccacaactggtgcaaggatgaatttgccaaaggcgggtggttcttcgcccctccacagctgctgtcaaagagcctggatgaactgcgctgtcgtcacggtaatgtcctgtttgcaaactccgattgggccttaggttggcgtggttttatcgatggtgctatcgaggagggcacccgcgcagcggttactgtaattgaggaactgcgtcctgcgcctgcggtgcgttcccacctg

SEQ ID NO: 1040 - protein, 495 aa, synthetic construct
  REGION 1..495: note = Variant of monoamine oxidase
MTSRDGYQWTPETGLTQGVPSLGVISPPTNIEDTDKDGPWDVIVIGGGYCGLTATRDLTVAGFKTLLLEARDRIGGRSWSSNIDGYGYEMGGTWVHWHQSHVWREITRYKMHGALSPSFNFSRGVNHFQLRTNPTTSTYMTHEALDELLRSALHKFTNVDGTNGRTVLPFPHDMFYVPEFRKYDEMSYSERIDQIRDDLSLNERSSLEAFILLCSGGTLENSSFGEFLHWWAMSGYTYQGCIDCLMSYKFKDGQSAFARRFFEEALGTGRLGYVFGCPVRSVVNERDAVRVTARDGREFAAKRLVCTIPLNVLSSVHFSPPLSPQRMAAANIGHVNQCVKVHAEVSCPDMRSWSGISYPFNKLAYAIGDGTTPAGNTHIVCLGGAHNHIQPEEDVEATKMAVENMSPGNMDIKRLVFHNWCKDEFAKGGWFFAPPQLLSKSLDELRCRHGNVLFANSDWALGWRGFIDGAIEEGTRAAVTVIEELRPAPAVRSHL

SEQ ID NO: 1041 - DNA, 1485 bp, synthetic construct
  misc_feature 1..1485: note = Variant of monoamine oxidase
  source 1..1485: mol_type = other DNA
atgaccagccgcgacggctatcagtggaccccggaaacgggtctgacccagggcgtaccgtccctgggtgtcatttcgccgccgactaacatcgaagataccgataaggacgggccttgggatgtcattgtcattgggggcgggtattgtgggctgaccgcaacccgtgatttaaccgtcgcagggttcaagacgctgctgctggaggcccgtgatcgtattggtggccgctcctggagcagtaatattgacggttacccgtatgagatgggtggcacttgggttcattggcatcaatctcacgtgtggcgtgaaatcacgcgttataaaatgcacaacgcgctgtctaaatcatttaacttttcacgtggcgtgaatcacttccaactgcgtaccaatccgaccaccagtacgtacatgacgcacgaagcggaggatgaactgatgcgtagcgcattgcataaattcaccaatgtcgacggcactaatggccgtacagtgttgccgttcccacatgatatgttttatgtgccggaatttcgcaagtatgacgaaatgtcatattccgaacgcattgaccagatccgcgacgagctgtctttgaacgaacgctctagtttagaggctttcattttattatgtagcggtggcaccctggaaaactccagctttggtgaatttctgcattggtgggcaatgtcgggttacacgtatcagggctgtatggattgtttaatctcctataaatttaaggatggccagagtgcgttcgcgcgtcgcttctgggaagaagccgctggcactggccgtctgggctatgtctttggttgtccggtgcgttctgtggtgaacgaacgcgacgcagtacgtgttaccgcacgtgacggtcgcgaattcgcagcgaaacgtttggtttgcacgattccgctgaacgtattgagttctgttcattttagcccaccactgtccccgcaacgcatggccgctgcgaacattggccatgttaaccagtgcgtcaaagtgcatgcggaagtcagttgtccggatatgcgttcatggtcgggtatctcctatccgttcaacaaattagcctacgctatcggcgatggcacgaccccagcgggtaatacgcatattgtgtgccttgggggggcccataatcatatccagccggaagaggacgtggaagcaacgaagatggccgttgaaaacatgtcgcctgggaatatggatatcaaacgtctggtcttccacaactggtgcaaggatgaatttgccaaaggcgggtggttcttcgcccctccacagctgctgtcaaagagcctggatgaactgcgctgccgtcacggtaatgtcctgtttgcaaactccgattgggccttaggttggcgtggttttatcgatggtgctatcgaggagggcacccgcgcagcggttactgtaattgaggaactgcgtcctgcgcctgcggtgcgttcccacctg

SEQ ID NO: 1042 - protein, 495 aa, synthetic construct
  REGION 1..495: note = Variant of monoamine oxidase
MTSRDGYQWTPETGLTQGVPSLGVISPPTNIEDTDKDGPWDVIVIGGGYCGLTATRDLTVAGFKTLLLEARDRIGGRSWSSNIDGYPYEMGGTWVHWHQSHVWREITRYKMHNALSKSFNFSRGVNHFQLRTNPTTSTYMTHEAEDELMRSALHKFTNVDGTNGRTVLPFPHDMFYVPEFRKYDEMSYSERIDQIRDELSLNERSSLEAFILLCSGGTLENSSFGEFLHWWAMSGYTYQGCMDCLISYKFKDGQSAFARRFWEEAAGTGRLGYVFGCPVRSVVNERDAVRVTARDGREFAAKRLVCTIPLNVLSSVHFSPPLSPQRMAAANIGHVNQCVKVHAEVSCPDMRSWSGISYPFNKLAYAIGDGTTPAGNTHIVCLGGAHNHIQPEEDVEATKMAVENMSPGNMDIKRLVFHNWCKDEFAKGGWFFAPPQLLSKSLDELRCRHGNVLFANSDWALGWRGFIDGAIEEGTRAAVTVIEELRPAPAVRSHL

SEQ ID NO: 1043 - DNA, 1485 bp, synthetic construct
  misc_feature 1..1485: note = Variant of monoamine oxidase
  source 1..1485: mol_type = other DNA
atgaccagccgcgacggctatcagtggaccccggaaacgggtctgacccagggcgtaccgtccctgggtgtcatttcgccgccgactaacatcgaagataccgataaggacgggccttgggatgtcattgtcattgggggcgggtattgtgggctgaccgcaacccgtgatttaaccgtcgcagggttcaagacgctgctgctggaggcccgtgatcgtattggtggccgctcctggagcagtaatattgacggttacctgtatgagatgggtggcacttgggttcattggcatcaatctcacgtgtggcgtgaaatcacgcgttataaaatgcacaacgcgctgtctccgtcatttaacttttcacgtggcgtgaatcacttccaactgcgtaccaatccgaccaccagtacgtacatgacgcacgaagcggaggatgaactgctgcgtagcgcattgcataaattcaccaatgtcgacggcactaatggccgtacagtgttgccgttcccacatgatatgttttatgtgccggaatttcgcaagtatgacgaaatgtcatattccgaacgcattgaccagatccgcgacgaactgtctttgaacgaacgctctagtttagaggctttcattttattatgtagcggtggcaccctggaaaactccagctttggtgaatttctgcattggtgggcaatgtcgggttacacgtatcagggctgtatggattgtttaatttcctataaatttaaggatggccagagtgcgttcgcgcgtcgcttctgggaagaagccgctggcactggccgtctgggctatgtctttggttgtccggtgcgttctgtggtggacgaacgcgacgcagtacgtgttaccgcacgtgacggtcgcgaattcgcagcgaaacgtttggtttgcacgattccgctgaacgtattgagttctgttcattttagcccaccactgtccccgcaacgcatggccgctgcgaacattggccatgttaaccagggcgtcaaagtgcatgcggaagtcagtaacccggatatgcgttcatggtcgggtatctcctatccgttcaacaaattagcctacgctatcggcgatggcacgaccccagcgggtaatacgcatattgtgtgccttgggggggcccataatcatatccagccggaagaggacgtggaagcaacgaagatggccgttgaaaacatgtcgcctgggaatatggatatcaaacgtctggtcttccacaactggtgcaaggatgaatttgccaaaggcgggtggttcttcgcccctccacagctgctgtcaaagagcctggatgaactgcgctgccgtcacggtaatgtcctgtttgcaaactccgattgggccttaggttggcgtggttttatcgatggtgctatcgaggagggcacccgcgcagcggttactgtaattgaggaactgcgtcctgcgcctgcggtgcgttcccacctg

SEQ ID NO: 1044 - protein, 495 aa, synthetic construct
  REGION 1..495: note = Variant of monoamine oxidase
MTSRDGYQWTPETGLTQGVPSLGVISPPTNIEDTDKDGPWDVIVIGGGYCGLTATRDLTVAGFKTLLLEARDRIGGRSWSSNIDGYLYEMGGTWVHWHQSHVWREITRYKMHNALSPSFNFSRGVNHFQLRTNPTTSTYMTHEAEDELLRSALHKFTNVDGTNGRTVLPFPHDMFYVPEFRKYDEMSYSERIDQIRDELSLNERSSLEAFILLCSGGTLENSSFGEFLHWWAMSGYTYQGCMDCLISYKFKDGQSAFARRFWEEAAGTGRLGYVFGCPVRSVVDERDAVRVTARDGREFAAKRLVCTIPLNVLSSVHFSPPLSPQRMAAANIGHVNQGVKVHAEVSNPDMRSWSGISYPFNKLAYAIGDGTTPAGNTHIVCLGGAHNHIQPEEDVEATKMAVENMSPGNMDIKRLVFHNWCKDEFAKGGWFFAPPQLLSKSLDELRCRHGNVLFANSDWALGWRGFIDGAIEEGTRAAVTVIEELRPAPAVRSHL

SEQ ID NO: 1045 - DNA, 1485 bp, synthetic construct
  misc_feature 1..1485: note = Variant of monoamine oxidase
  source 1..1485: mol_type = other DNA
atgaccagccgcgacggctatcagtggaccccggaaacgggtctgacccagggcgtaccgtccctgggtgtcatttcgccgccgactaacatcgaagataccgataaggacgggccttgggatgtcattgtcattgggggcgggtattgtgggctgaccgcaacccgtgatttaaccgtcgcagggttcaagacgctgctgctggaggcccgtgatcgtattggtggccgctcctggagcagtaatattgacggttacccgtatgagatgggtggcacttgggttcattggcatcaatctcacgtgtggcgtgaaatcacgcgttataaaatgcacaatgcgctgtctccgtcatttaacttttcacgtggcgtgaatcacttccaactgcgtaccaatccgaccaccagtacgtacatgacgcacgaagcgctggatgaactgatgcgtagcgcattgcataaattcaccaatgtcgacggcactaatggccgtacagtgttgccgttcccacatgatatgttttatgtgccggaatttcgcaagtatgacgaaatgtcatattccgaacgcattgaccagatccgcgacgaactgtctttgaacgaacgctctagtttagaggctttcattttattatgtagcggtggcaccctggaaaactccagctttggtgaatttctgcattggtgggcaatgtcgggttacacgtatcagggctgtatggattgtttaatctcctataaatttaaggatggccagagtgcgttcgcgcgtagcttctgggaagaagccctgggcactggccgtctgggctatgtctttggttgtccggtgcgttctgtggtgaacgaacgcgacgcagtacgtgttaccgcacgtgacggtcgcgaattcgcagcgaaacgtttggtttgcacgattccgctgaacgtattgagttctgttcattttagcccaccactgtccccgcaacgcatggccgctgcgaacattggccatgttaaccagggcgtcaaagtgcatgcggaagtcagtaacccggatatgcgttcatggtcgggtatctcctatccgttcaacaaattagcctacgctatcggcgatggcacgaccccagcgggtaatacgcatattgtggctcttggtggggcccataatcatatccagccggaagaggacgtggaagcaacgaagatggccgttgaaaacatgtcgcctgggaatatggatatcaaacgtctggtcttccacaactggtgcaaggatgaatttgccaaaggcgggtggttcttcgcccctccacagctgctgtcaaagagcctggatgaactgcgcgctcgtcacggtaatgtcctgtttgcaaactccgattgggccttaggttggcgtggttttatcgatggtgctatcgaggagggcacccgcgcagcggttactgtaattgaggaactgcgtcctgcgcctgcggtgcgttcccacctg

SEQ ID NO: 1046 - protein, 495 aa, synthetic construct
  REGION 1..495: note = Variant of monoamine oxidase
MTSRDGYQWTPETGLTQGVPSLGVISPPTNIEDTDKDGPWDVIVIGGGYCGLTATRDLTVAGFKTLLLEARDRIGGRSWSSNIDGYPYEMGGTWVHWHQSHVWREITRYKMHNALSPSFNFSRGVNHFQLRTNPTTSTYMTHEALDELMRSALHKFTNVDGTNGRTVLPFPHDMFYVPEFRKYDEMSYSERIDQIRDELSLNERSSLEAFILLCSGGTLENSSFGEFLHWWAMSGYTYQGCMDCLISYKFKDGQSAFARSFWEEALGTGRLGYVFGCPVRSVVNERDAVRVTARDGREFAAKRLVCTIPLNVLSSVHFSPPLSPQRMAAANIGHVNQGVKVHAEVSNPDMRSWSGISYPFNKLAYAIGDGTTPAGNTHIVALGGAHNHIQPEEDVEATKMAVENMSPGNMDIKRLVFHNWCKDEFAKGGWFFAPPQLLSKSLDELRARHGNVLFANSDWALGWRGFIDGAIEEGTRAAVTVIEELRPAPAVRSHL

SEQ ID NO: 1047 - DNA, 1485 bp, synthetic construct
  misc_feature 1..1485: note = Variant of monoamine oxidase
  source 1..1485: mol_type = other DNA
atgaccagccgcgacggctatcagtggaccccggaaacgggtctgacccagggcgtaccgtccctgggtgtcatttcgccgccgactaacatcgaagataccgataaggacgggccttgggatgtcattgtcattgggggcgggtattgtgggctgaccgcaacccgtgatttaaccgtcgcagggttcaagacgctgctgctggaggcccgtgatcgtattggtggccgctcctggagcagtaatattgacggttacccgtatgagatgggtggcacttgggttcattggcatcaatctcacgtgtggcgtgaaatcacgcgttataaaatgcacaacgcgctgtctccatcatttaacttttcacgtggcgtgaatcacttccaactgcgtaccaatccgaccaccagtacgtacatgacgcacgaagcggaggatgaactgctgcgtagcgcattgcataaattcaccaatgtcgacggcactaatggccgtacagtgttgccgttcccacatgatatgttttatgtgccggaatttcgcaagtatgacgaaatgtcatattccgaacgcattgaccagatccgcgacgaactgtctttgaacgaacgctctagtttagaggctttcattttattatgtagcggtggcaccctggaaaactccagctttggtgaatttctgcattggtgggcaatgtcgggttacacgtatcagggctgtatggattgtttaatgtcctataaatttaaggatggccagagtgcgttcgcgcgtcgcttctgggaagaagccgctggcactggccgtctgggctatgtctttggttgtccggtgcgttctgtggtgaacgaacgcgacgcagtacgtgttaccgcacgtgacggtcgcgaattcgcagcgaaacgtttggtttgcacgattccgctgaacgtattgagttctgttcattttagcccaccactgtccccgcaacgcatggccgctgcgaacattggccatgttaaccagtgcgtcaaagtgcatgcggaagtcagttgtccggatatgcgttcatggtcgggtatctcctatccgttcaacaaattagcctacgctatcggcgatggcacgaccccagcgggtaatacgcatattgtgtgccttgggggggcccataatcatatccagccggaagaggacgtggaagcaacgaagatggccgttgaaaacatgtcgcctgggaatatggatatcaaacgtctggtcttccacaactggtgcaaggatgaatttgccaaaggcgggtggttcttcgcccctccacagctgctgtcaaagagcctggatgaactgcgctgccgtcacggtaatgtcctgtttgcaaactccgattgggccttaggttggcgtggttttatcgatggtgctatcgaggagggcacccgcgcagcggttactgtaattgaggaactgcgtcctgcgcctgcggtgcgttcccacctg

SEQ ID NO: 1048 - protein, 495 aa, synthetic construct
  REGION 1..495: note = Variant of monoamine oxidase
MTSRDGYQWTPETGLTQGVPSLGVISPPTNIEDTDKDGPWDVIVIGGGYCGLTATRDLTVAGFKTLLLEARDRIGGRSWSSNIDGYPYEMGGTWVHWHQSHVWREITRYKMHNALSPSFNFSRGVNHFQLRTNPTTSTYMTHEAEDELLRSALHKFTNVDGTNGRTVLPFPHDMFYVPEFRKYDEMSYSERIDQIRDELSLNERSSLEAFILLCSGGTLENSSFGEFLHWWAMSGYTYQGCMDCLMSYKFKDGQSAFARRFWEEAAGTGRLGYVFGCPVRSVVNERDAVRVTARDGREFAAKRLVCTIPLNVLSSVHFSPPLSPQRMAAANIGHVNQCVKVHAEVSCPDMRSWSGISYPFNKLAYAIGDGTTPAGNTHIVCLGGAHNHIQPEEDVEATKMAVENMSPGNMDIKRLVFHNWCKDEFAKGGWFFAPPQLLSKSLDELRCRHGNVLFANSDWALGWRGFIDGAIEEGTRAAVTVIEELRPAPAVRSHL

SEQ ID NO: 1049 - DNA, 1485 bp, synthetic construct
  misc_feature 1..1485: note = Variant of monoamine oxidase
  source 1..1485: mol_type = other DNA
atgaccagccgcgacggctatcagtggaccccggaaacgggtctgacccagggcgtaccgtccctgggtgtcatttcgccgccgactaacatcgaagataccgataaggacgggccttgggatgtcattgtcattgggggcgggtattgtgggctgaccgcaacccgtgatttaaccgtcgcagggttcaagacgctgctgctggaggcccgtgatcgtattggtggccgctcctggagcagtaatattgacggttacccgtatgagatgggtggcacttgggttcattggcatcaatctcacgtgtggcgtgaaatcacgcgttataaaatgcacaatgcgctgtctccgtcatttaacttttcacgtggcgtgaatcacttccaactgcgtaccaatccgaccaccagtacgtacatgacgcacgaagcggaggatgaactgctgcgtagcgcattgcataaattcaccaatgtcgacggcactaatggccgtacagtgttgccgttcccacatgatatgttttatgtgccggaatttcgcaagtatgacgaaatgtcatattccgaacgcattgaccagatccgcgacgagctgtctttgaacgaacgctctagtttagaggctttcattttattatgtagcggtggcaccctggaaaactccagctttggtgaatttctgcattggtgggcaatgtcgggttacacgtatcagggctgtatggattgtttaatctcctataaatttaaggatggccagagtgcgttcgcgcgtcgcttctgggaagaagccgctggcactggccgtctgggctatgtctttggttgtccggtgcgttctgtggtgaacgaacgcgacgcagtacgtgttaccgcacgtgacggtcgcgaattcgcagcgaaacgtttggtttgcacgattccgctgaacgtattgagttctgttcattttagcccaccactgtccccgcaacgcatggccgctgcgaacattggccatgttaaccagtgcgtcaaagtgcatgcggaagtcagttgtccggatatgcgttcatggtcgggtatctcctatccgttcaacaaattagcctacgctatcggcgatggcacgaccccagcgggtaatacgcatattgtgtgccttgggggggcccataatcatatccagccggaagaggacgtggaagcaacgaagatggccgttgaaaacatgtcgcctgggaatatggatatcaaacgtctggtcttccacaactggtgcaaggatgaatttgccaaaggcgggtggttcttcgcccctccacagctgctgtcaaagagcctggatgaactgcgcgctcgtcacggtaatgtcctgtttgcaaactccgattgggccttaggttggcgtggttttatcgatggtgctatcgaggagggcacccgcgcagcggttactgtaattgaggaactgcgtcctgcgcctgcggtgcgttcccacctg

SEQ ID NO: 1050 - protein, 495 aa, synthetic construct
  REGION 1..495: note = Variant of monoamine oxidase
MTSRDGYQWTPETGLTQGVPSLGVISPPTNIEDTDKDGPWDVIVIGGGYCGLTATRDLTVAGFKTLLLEARDRIGGRSWSSNIDGYPYEMGGTWVHWHQSHVWREITRYKMHNALSPSFNFSRGVNHFQLRTNPTTSTYMTHEAEDELLRSALHKFTNVDGTNGRTVLPFPHDMFYVPEFRKYDEMSYSERIDQIRDELSLNERSSLEAFILLCSGGTLENSSFGEFLHWWAMSGYTYQGCMDCLISYKFKDGQSAFARRFWEEAAGTGRLGYVFGCPVRSVVNERDAVRVTARDGREFAAKRLVCTIPLNVLSSVHFSPPLSPQRMAAANIGHVNQCVKVHAEVSCPDMRSWSGISYPFNKLAYAIGDGTTPAGNTHIVCLGGAHNHIQPEEDVEATKMAVENMSPGNMDIKRLVFHNWCKDEFAKGGWFFAPPQLLSKSLDELRARHGNVLFANSDWALGWRGFIDGAIEEGTRAAVTVIEELRPAPAVRSHL

SEQ ID NO: 1051 - DNA, 1485 bp, synthetic construct
  misc_feature 1..1485: note = Variant of monoamine oxidase
  source 1..1485: mol_type = other DNA
atgaccagccgcgacggctatcagtggaccccggaaacgggtctgacccagggcgtaccgtccctgggtgtcatttcgccgccgactaacatcgaagataccgataaggacgggccttgggatgtcattgtcattgggggcgggtattgtgggctgaccgcaacccgtgatttaaccgtcgcagggttcaagacgctgctgctggaggcccgtgatcgtattggtggccgctcctggagcagtaatattgacggttacccgtatgagatgggtggcacttgggttcattggcatcaatctcacgtgtggcgtgaaatcacgcgttataaaatgcacaacgcgctgtctccatcatttaacttttcacgtggcgtgaatcacttccaactgcgtaccaatccgaccaccagtacgtacatgacgcacgaagcggaggatgaactgctgcgtagcgcattgcataaattcaccaatgtcgacggcactaatggccgtacagtgttgccgttcccacatgatatgttttatgtgccggaatttcgcaagtatgacgaaatgtcatattccgaacgcattgaccagatccgcgacgacctgtctttgaacgaacgctctagtttagaggctttcattttattatgtagcggtggcaccctggaaaactccagctttggtgaatttctgcattggtgggcaatgtcgggttacacgtatcagggctgtatggattgtttaatctcctataaatttaaggatggccagagtgcgttcgcgcgtcgcttctgggaagaagccgctggcactggccgtctgggctatgtctttggttgtccggtgcgttctgtggtgaacgaacgcgacgcagtacgtgttaccgcacgtgacggtcgcgaattcgcagcgaaacgtttggtttgcacgattccgctgaacgtattgagttctgttcattttagcccaccactgtccccgcaacgcatggccgctgcgaacattggccatgttaaccagtgcgtcaaagtgcatgcggaagtcagttgtccggatatgcgttcatggtcgggtatctcctatccgttcaacaaattagcctacgctatcggcgatggcacgaccccagcgggtaatacgcatattgtgtgtcttggtggggcccataatcatatccagccggaagaggacgtggaagcaacgaagatggccgttgaaaacatgtcgcctgggaatatggatatcaaacgtctggtcttccacaactggtgcaaggatgaatttgccaaaggcgggtggttcttcgcccctccacagctgctgtcaaagagcctggatgaactgcgcgctcgtcacggtaatgtcctgtttgcaaactccgattgggccttaggttggcgtggttttatcgatggtgctatcgaggagggcacccgcgcagcggttactgtaattgaggaactgcgtcctgcgcctgcggtgcgttcccacctg

SEQ ID NO: 1052 - protein, 495 aa, synthetic construct
  REGION 1..495: note = Variant of monoamine oxidase
MTSRDGYQWTPETGLTQGVPSLGVISPPTNIEDTDKDGPWDVIVIGGGYCGLTATRDLTVAGFKTLLLEARDRIGGRSWSSNIDGYPYEMGGTWVHWHQSHVWREITRYKMHNALSPSFNFSRGVNHFQLRTNPTTSTYMTHEAEDELLRSALHKFTNVDGTNGRTVLPFPHDMFYVPEFRKYDEMSYSERIDQIRDDLSLNERSSLEAFILLCSGGTLENSSFGEFLHWWAMSGYTYQGCMDCLISYKFKDGQSAFARRFWEEAAGTGRLGYVFGCPVRSVVNERDAVRVTARDGREFAAKRLVCTIPLNVLSSVHFSPPLSPQRMAAANIGHVNQCVKVHAEVSCPDMRSWSGISYPFNKLAYAIGDGTTPAGNTHIVCLGGAHNHIQPEEDVEATKMAVENMSPGNMDIKRLVFHNWCKDEFAKGGWFFAPPQLLSKSLDELRARHGNVLFANSDWALGWRGFIDGAIEEGTRAAVTVIEELRPAPAVRSHL

SEQ ID NO: 1053 - DNA, 1485 bp, synthetic construct
  misc_feature 1..1485: note = Variant of monoamine oxidase
  source 1..1485: mol_type = other DNA
atgaccagccgcgacggctatcagtggaccccggaaacgggtctgacccagggcgtaccgtccctgggtgtcatttcgccgccgactaacatcgaagataccgataaggacgggccttgggatgtcattgtcattgggggcgggtattgtgggctgaccgcaacccgtgatttaaccgtcgcagggttcaagacgctgctgctggaggcccgtgatcgtattggtggccgctcctggagcagtaatattgacggttacgggtatgagatgggtggcacttgggttcattggcatcaatctcacgtgtggcgtgaaatcacgcgttataaaatgcacaatgcgctgtctccgtcatttaacttttcacgtggcgtgaatcacttccaactgcgtaccaatccgaccaccagtacgtacatgacgcacgaagcggaggatgaactgatgcgtagcgcattgcataaattcaccaatgtcgacggcactaatggccgtacagtgttgccgttcccacatgatatgttttatgtgccggaatttcgcaagtatgacgaaatgtcatattccgaacgcattgaccagatccgcgacgaactgtctttgaacgaacgctctagtttagaggctttcattttattatgtagcggtggcaccctggaaaactccagctttggtgaatttctgcattggtgggcaatgtctggttacacgtatcagggctgtattgattgtttaatttcctataaatttaaggatggccagagtgcgttcgcgcgtagcttctgggaagaagccctgggcactggccgtctgggctatgtctttggttgtccggtgcgttctgtggtgaacgaacgcgacgcagtacgtgttaccgcacgtgacggtcgcgaattcgcagcgaaacgtttggtttgcacgattccgctgaacgtattgagttctgttcattttagcccaccactgtccccgcaacgcatggccgctgcgaacattggccatgttaaccagtgcgtcaaagtgcatgcggaagtcagttgtccggatatgcgttcatggtcgggtatctcctatccgttcaacaaattagcctacgctatcggcgatggcacgaccccagcgggtaatacgcatattgtgtgccttgggggggcccataatcatatccagccggaagaggacgtggaagcaacgaagatggccgttgaaaacatgtcgcctgggaatatggatatcaaacgtctggtcttccacaactggtgcaaggatgaatttgccaaaggcgggtggttcttcgcccctccacagctgctgtcaaagagcctggatgaactgcgctgccgtcacggtaatgtcctgtttgcaaactccgattgggccttaggttggcgtggttttatcgatggtgctatcgaggagggcacccgcgcagcggttactgtaattgaggaactgcgtcctgcgcctgcggtgcgttcccacctg

SEQ ID NO: 1054 - protein, 495 aa, synthetic construct
  REGION 1..495: note = Variant of monoamine oxidase
MTSRDGYQWTPETGLTQGVPSLGVISPPTNIEDTDKDGPWDVIVIGGGYCGLTATRDLTVAGFKTLLLEARDRIGGRSWSSNIDGYGYEMGGTWVHWHQSHVWREITRYKMHNALSPSFNFSRGVNHFQLRTNPTTSTYMTHEAEDELMRSALHKFTNVDGTNGRTVLPFPHDMFYVPEFRKYDEMSYSERIDQIRDELSLNERSSLEAFILLCSGGTLENSSFGEFLHWWAMSGYTYQGCIDCLISYKFKDGQSAFARSFWEEALGTGRLGYVFGCPVRSVVNERDAVRVTARDGREFAAKRLVCTIPLNVLSSVHFSPPLSPQRMAAANIGHVNQCVKVHAEVSCPDMRSWSGISYPFNKLAYAIGDGTTPAGNTHIVCLGGAHNHIQPEEDVEATKMAVENMSPGNMDIKRLVFHNWCKDEFAKGGWFFAPPQLLSKSLDELRCRHGNVLFANSDWALGWRGFIDGAIEEGTRAAVTVIEELRPAPAVRSHL

SEQ ID NO: 1055 - DNA, 1485 bp, synthetic construct
  misc_feature 1..1485: note = Variant of monoamine oxidase
  source 1..1485: mol_type = other DNA
atgaccagccgcgacggctatcagtggaccccggaaacgggtctgacccagggcgtaccgtccctgggtgtcatttcgccgccgactaacatcgaagataccgataaggacgggccttgggatgtcattgtcattgggggcgggtattgtgggctgaccgcaacccgtgatttaaccgtcgcagggttcaagacgctgctgctggaggcccgtgatcgtattggtggccgctcctggagcagtaatattgacggttacccgtatgagatgggtggcacttgggttcattggcatcaatctcacgtgtggcgtgaaatcacgcgttataaaatgcacaacgcgctgtctccatcatttaacttttcacgtggcgtgaatcacttccaactgcgtaccaatccgaccaccagtacgtacatgacgcacgaagcggaggatgaactgctgcgtagcgcattgcataaattcaccaatgtcgacggcactaatggccgtacagtgttgccgttcccacatgatatgttttatgtgccggaatttcgcaagtatgacgaaatgtcatattccgaacgcattgaccagatccgcgacgaactgtctttgaacgaacgctctagtttagaggctttcattttattatgtagcggtggcaccctggaaaactccagctttggtgaatttctgcattggtgggcaatgtcgggttacacgtatcagggctgtattgattgtttaatttcctataaatttaaggatggccagagtgcgttcgcgcgtcgcttctgggaagaagccgctggcactggccgtctgggctatgtctttggttgtccggtgcgttctgtggtgaacgaacgcgacgcagtacgtgttaccgcacgtgacggtcgcgaattcgcagcgaaacgtttggtttgcacgattccgctgaacgtattgagttctgttcattttagcccaccactgtccccgcaacgcatggccgctgcgaacattggccatgttaaccagtgcgtcaaagtgcatgcggaagtcagttgtccggatatgcgttcatggtcgggtatctcctatccgttcaacaaattagcctacgctatcggcgatggcacgaccccagcgggtaatacgcatattgtggctcttggtggggcccataatcatatccagccggaagaggacgtggaagcaacgaagatggccgttgaaaacatgtcgcctgggaatatggatatcaaacgtctggtcttccacaactggtgcaaggatgaatttgccaaaggcgggtggttcttcgcccctccacagctgctgtcaaagagcctggatgaactgcgctgccgtcacggtaatgtcctgtttgcaaactccgattgggccttaggttggcgtggttttatcgatggtgctatcgaggagggcacccgcgcagcggttactgtaattgaggaactgcgtcctgcgcctgcggtgcgttcccacctg

SEQ ID NO: 1056 - protein, 495 aa, synthetic construct
  REGION 1..495: note = Variant of monoamine oxidase
MTSRDGYQWTPETGLTQGVPSLGVISPPTNIEDTDKDGPWDVIVIGGGYCGLTATRDLTVAGFKTLLLEARDRIGGRSWSSNIDGYPYEMGGTWVHWHQSHVWREITRYKMHNALSPSFNFSRGVNHFQLRTNPTTSTYMTHEAEDELLRSALHKFTNVDGTNGRTVLPFPHDMFYVPEFRKYDEMSYSERIDQIRDELSLNERSSLEAFILLCSGGTLENSSFGEFLHWWAMSGYTYQGCIDCLISYKFKDGQSAFARRFWEEAAGTGRLGYVFGCPVRSVVNERDAVRVTARDGREFAAKRLVCTIPLNVLSSVHFSPPLSPQRMAAANIGHVNQCVKVHAEVSCPDMRSWSGISYPFNKLAYAIGDGTTPAGNTHIVALGGAHNHIQPEEDVEATKMAVENMSPGNMDIKRLVFHNWCKDEFAKGGWFFAPPQLLSKSLDELRCRHGNVLFANSDWALGWRGFIDGAIEEGTRAAVTVIEELRPAPAVRSHL

SEQ ID NO: 1057 - DNA, 1485 bp, synthetic construct
  misc_feature 1..1485: note = Variant of monoamine oxidase
  source 1..1485: mol_type = other DNA
atgaccagccgcgacggctatcagtggaccccggaaacgggtctgacccagggcgtaccgtccctgggtgtcatttcgccgccgactaacatcgaagataccgataaggacgggccttgggatgtcattgtcattgggggcgggtattgtgggctgaccgcaacccgtgatttaaccgtcgcagggttcaagacgctgctgctggaggcccgtgatcgtattggtggccgctcctggagcagtaatattgacggttacccgtatgagatgggtggcacttgggttcattggcatcaatctcacgtgtggcgtgaaatcacgcgttataaaatgcacaacgcgctgtctccatcatttaacttttcacgtggcgtgaatcacttccaactgcgtaccaatccgaccaccagtacgtacatgacgcacgaagcggaggatgaactgctgcgtagcgcattgcataaattcaccaatgtcgacggcactaatggccgtacagtgttgccgttcccacatgatatgttttatgtgccggaatttcgcaagtatgacgaaatgtcatattccgaacgcattgaccagatccgcgacgaactgtctttgaacgaacgctctagtttagaggctttcattttattatgtagcggtggcaccctggaaaactccagctttggtgaatttctgcattggtgggcaatgtcgggttacacgtatcagggctgtattgattgtttaatttcctataaatttaaggatggccagagtgcgttcgcgcgtagcttctttgaagaagccgctggcactggccgtctgggctatgtctttggttgtccggtgcgttctgtggtgaacgaacgcgacgcagtacgtgttaccgcacgtgacggtcgcgaattcgcagcgaaacgtttggtttgcacgattccgctgaacgtattgagttctgttcattttagcccaccactgtccccgcaacgcatggccgctgcgaacattggccatgttaaccagggcgtcaaagtgcatgcggaagtcagttgcccggatatgcgttcatggtcgggtatctcctatccgttcaacaaattagcctacgctatcggcgatggcacgaccccagcgggtaatacgcatattgtgtgtcttggtggggcccataatcatatccagccggaagaggacgtggaagcaacgaagatggccgttgaaaacatgtcgcctgggaatatggatatcaaacgtctggtcttccacaactggtgcaaggatgaatttgccaaaggcgggtggttcttcgcccctccacagctgctgtcaaagagcctggatgaactgcgctgtcgtcacggtaatgtcctgtttgcaaactccgattgggccttaggttggcgtggttttatcgatggtgctatcgaggagggcacccgcgcagcggttactgtaattgaggaactgcgtcctgcgcctgcggtgcgttcccacctg

SEQ ID NO: 1058 - protein, 495 aa, synthetic construct
  REGION 1..495: note = Variant of monoamine oxidase
MTSRDGYQWTPETGLTQGVPSLGVISPPTNIEDTDKDGPWDVIVIGGGYCGLTATRDLTVAGFKTLLLEARDRIGGRSWSSNIDGYPYEMGGTWVHWHQSHVWREITRYKMHNALSPSFNFSRGVNHFQLRTNPTTSTYMTHEAEDELLRSALHKFTNVDGTNGRTVLPFPHDMFYVPEFRKYDEMSYSERIDQIRDELSLNERSSLEAFILLCSGGTLENSSFGEFLHWWAMSGYTYQGCIDCLISYKFKDGQSAFARSFFEEAAGTGRLGYVFGCPVRSVVNERDAVRVTARDGREFAAKRLVCTIPLNVLSSVHFSPPLSPQRMAAANIGHVNQGVKVHAEVSCPDMRSWSGISYPFNKLAYAIGDGTTPAGNTHIVCLGGAHNHIQPEEDVEATKMAVENMSPGNMDIKRLVFHNWCKDEFAKGGWFFAPPQLLSKSLDELRCRHGNVLFANSDWALGWRGFIDGAIEEGTRAAVTVIEELRPAPAVRSHL

SEQ ID NO: 1059 - DNA, 1485 bp, synthetic construct
  misc_feature 1..1485: note = Variant of monoamine oxidase
  source 1..1485: mol_type = other DNA
atgaccagccgcgacggctatcagtggaccccggaaacgggtctgacccagggcgtaccgtccctgggtgtcatttcgccgccgactaacatcgaagataccgataaggacgggccttgggatgtcattgtcattgggggcgggtattgtgggctgaccgcaacccgtgatttaaccgtcgcagggttcaagacgctgctgctggaggcccgtgatcgtattggtggccgctcctggagcagtaatattgacggttacccgtatgagatgggtggcacttgggttcattggcatcaatctcacgtgtggcgtgaaatcacgcgttataaaatgcacggggcgctgtctaaatcatttaacttttcacgtggcgtgaatcacttccaactgcgtaccaatccgaccaccagtacgtacatgacgcacgaagcggaggatgaactgctgcgtagcgcattgcataaattcaccaatgtcgacggcactaatggccgtacagtgttgccgttcccacatgatatgttttatgtgccggaatttcgcaagtatgacgaaatgtcatattccgaacgcattgaccagatccgcgacgaactgtctttgaacgaacgctctagtttagaggctttcattttattatgtagcggtggcaccctggaaaactccagctttggtgaatttctgcattggtgggcaatgtcgggttacacgtatcagggctgtatggattgtttaatctcctataaatttaaggatggccagagtgcgttcgcgcgtcgcttctgggaagaagccctgggcactggccgtctgggctatgtctttggttgtccggtgcgttctgtggtgaacgaacgcgacgcagtacgtgttaccgcacgtgacggtcgcgaattcgcagcgaaacgtttggtttgcacgattccgctgaacgtattgagttctgttcattttagcccaccactgtccccgcaacgcatggccgctgcgaacattggccatgttaaccagtgcgtcaaagtgcatgcggaagtcagttgtccggatatgcgttcatggtcgggtatctcctatccgttcaacaaattagcctacgctatcggcgatggcacgaccccagcgggtaatacgcatattgtggctcttggtggggcccataatcatatccagccggaagaggacgtggaagcaacgaagatggccgttgaaaacatgtcgcctgggaatatggatatcaaacgtctggtcttccacaactggtgcaaggatgaatttgccaaaggcgggtggttcttcgcccctccacagctgctgtcaaagagcctggatgaactgcgctgtcgtcacggtaatgtcctgtttgcaaactccgattgggccttaggttggcgtggttttatcgatggtgctatcgaggagggcacccgcgcagcggttactgtaattgaggaactgcgtcctgcgcctgcggtgcgttcccacctg

SEQ ID NO: 1060 - protein, 495 aa, synthetic construct
  REGION 1..495: note = Variant of monoamine oxidase
MTSRDGYQWTPETGLTQGVPSLGVISPPTNIEDTDKDGPWDVIVIGGGYCGLTATRDLTVAGFKTLLLEARDRIGGRSWSSNIDGYPYEMGGTWVHWHQSHVWREITRYKMHGALSKSFNFSRGVNHFQLRTNPTTSTYMTHEAEDELLRSALHKFTNVDGTNGRTVLPFPHDMFYVPEFRKYDEMSYSERIDQIRDELSLNERSSLEAFILLCSGGTLENSSFGEFLHWWAMSGYTYQGCMDCLISYKFKDGQSAFARRFWEEALGTGRLGYVFGCPVRSVVNERDAVRVTARDGREFAAKRLVCTIPLNVLSSVHFSPPLSPQRMAAANIGHVNQCVKVHAEVSCPDMRSWSGISYPFNKLAYAIGDGTTPAGNTHIVALGGAHNHIQPEEDVEATKMAVENMSPGNMDIKRLVFHNWCKDEFAKGGWFFAPPQLLSKSLDELRCRHGNVLFANSDWALGWRGFIDGAIEEGTRAAVTVIEELRPAPAVRSHL

SEQ ID NO: 1061 - DNA, 1485 bp, synthetic construct
  misc_feature 1..1485: note = Variant of monoamine oxidase
  source 1..1485: mol_type = other DNA
atgaccagccgcgacggctatcagtggaccccggaaacgggtctgacccagggcgtaccgtccctgggtgtcatttcgccgccgactaacatcgaagataccgataaggacgggccttgggatgtcattgtcattgggggcgggtattgtgggctgaccgcaacccgtgatttaaccgtcgcagggttcaagacgctgctgctggaggcccgtgatcgtattggtggccgctcctggagcagtaatattgacggttacgggtatgagatgggtggcacttgggttcattggcatcaatctcacgtgtggcgtgaaatcacgcgttataaaatgcacaatgcgctgtctaaatcatttaacttttcacgtggcgtgaatcacttccaactgcgtaccaatccgaccaccagtacgtacatgacgcacgaagcggaggatgaactgatgcgtagcgcattgcataaattcaccaatgtcgacggcactaatggccgtacagtgttgccgttcccacatgatatgttttatgtgccggaatttcgcaagtatgacgaaatgtcatattccgaacgcattgaccagatccgcgacgaactgtctttgaacgaacgctctagtttagaggctttcattttattatgtagcggtggcaccctggaaaactccagctttggtgaatttctgcattggtgggcaatgtcgggttacacgtatcagggctgtattgattgtttaatttcctataaatttaaggatggccagagtgcgttcgcgcgtcgcttctgggaagaagccgctggcactggccgtctgggctatgtctttggttgtccggtgcgttctgtggtgaacgaacgcgacgcagtacgtgttaccgcacgtgacggtcgcgaattcgcagcgaaacgtttggtttgcacgattccgctgaacgtattgagttctgttcattttagcccaccactgtccccgcaacgcatggccgctgcgaacattggccatgttaaccagtgcgtcaaagtgcatgcggaagtcagttgcccggatatgcgttcatggtcgggtatctcctatccgttcaacaaattagcctacgctatcggcgatggcacgaccccagcgggtaatacgcatattgtgtgccttgggggggcccataatcatatccagccggaagaggacgtggaagcaacgaagatggccgttgaaaacatgtcgcctgggaatatggatatcaaacgtctggtcttccacaactggtgcaaggatgaatttgccaaaggcgggtggttcttcgcccctccacagctgctgtcaaagagcctggatgaactgcgctgccgtcacggtaatgtcctgtttgcaaactccgattgggccttaggttggcgtggttttatcgatggtgctatcgaggagggcacccgcgcagcggttactgtaattgaggaactgcgtcctgcgcctgcggtgcgttcccacctg

SEQ ID NO: 1062 - protein, 495 aa, synthetic construct
  REGION 1..495: note = Variant of monoamine oxidase
MTSRDGYQWTPETGLTQGVPSLGVISPPTNIEDTDKDGPWDVIVIGGGYCGLTATRDLTVAGFKTLLLEARDRIGGRSWSSNIDGYGYEMGGTWVHWHQSHVWREITRYKMHNALSKSFNFSRGVNHFQLRTNPTTSTYMTHEAEDELMRSALHKFTNVDGTNGRTVLPFPHDMFYVPEFRKYDEMSYSERIDQIRDELSLNERSSLEAFILLCSGGTLENSSFGEFLHWWAMSGYTYQGCIDCLISYKFKDGQSAFARRFWEEAAGTGRLGYVFGCPVRSVVNERDAVRVTARDGREFAAKRLVCTIPLNVLSSVHFSPPLSPQRMAAANIGHVNQCVKVHAEVSCPDMRSWSGISYPFNKLAYAIGDGTTPAGNTHIVCLGGAHNHIQPEEDVEATKMAVENMSPGNMDIKRLVFHNWCKDEFAKGGWFFAPPQLLSKSLDELRCRHGNVLFANSDWALGWRGFIDGAIEEGTRAAVTVIEELRPAPAVRSHL

SEQ ID NO: 1063 - DNA, 1485 bp, synthetic construct
  misc_feature 1..1485: note = Variant of monoamine oxidase
  source 1..1485: mol_type = other DNA
atgaccagccgcgacggctatcagtggaccccggaaacgggtctgacccagggcgtaccgtccctgggtgtcatttcgccgccgactaacatcgaagataccgataaggacgggccttgggatgtcattgtcattgggggcgggtattgtgggctgaccgcaacccgtgatttaaccgtcgcagggttcaagacgctgctgctggaggcccgtgatcgtattggtggccgctcctggagcagtaatattgacggttacccgtatgagatgggtggcacttgggttcattggcatcaatctcacgtgtggcgtgaaatcacgcgttataaaatgcacggggcgctgtctaaatcatttaacttttcacgtggcgtgaatcacttccaactgcgtaccaatccgaccaccagtacgtacatgacgcacgaagcggaggatgaactgctgcgtagcgcattgcataaattcaccaatgtcgacggcactaatggccgtacagtgttgccgttcccacatgatatgttttatgtgccggaatttcgcaagtatgacgaaatgtcatattccgaacgcattgaccagatccgcgacgaactgtctttgaacgaacgctctagtttagaggctttcattttattatgtagcggtggcaccctggaaaactccagctttggtgaatttctgcattggtgggcaatgtcgggttacacgtatcagggctgtatggattgtttaatttcctataaatttaaggatggccagagtgcgttcgcgcgtcgcttctgggaagaagccgctggcactggccgtctgggctatgtctttggttgtccggtgcgttctgtggtgaacgaacgcgacgcagtacgtgttaccgcacgtgacggtcgcgaattcgcagcgaaacgtttggtttgcacgattccgctgaacgtattgagttctgttcattttagcccaccactgtccccgcaacgcatggccgctgcgaacattggccatgttaaccagtgcgtcaaagtgcatgcggaagtcagttgtccggatatgcgttcatggtcgggtatctcctatccgttcaacaaattagcctacgctatcggcgatggcacgaccccagcgggtaatacgcatattgtgtgccttgggggggcccataatcatatccagccggaagaggacgtggaagcaacgaagatggccgttgaaaacatgtcgcctgggaatatggatatcaaacgtctggtcttccacaactggtgcaaggatgaatttgccaaaggcgggtggttcttcgcccctccacagctgctgtcaaagagcctggatgaactgcgcgctcgtcacggtaatgtcctgtttgcaaactccgattgggccttaggttggcgtggttttatcgatggtgctatcgaggagggcacccgcgcagcggttactgtaattgaggaactgcgtcctgcgcctgcggtgcgttcccacctg

SEQ ID NO: 1064 - protein, 495 aa, synthetic construct
  REGION 1..495: note = Variant of monoamine oxidase
MTSRDGYQWTPETGLTQGVPSLGVISPPTNIEDTDKDGPWDVIVIGGGYCGLTATRDLTVAGFKTLLLEARDRIGGRSWSSNIDGYPYEMGGTWVHWHQSHVWREITRYKMHGALSKSFNFSRGVNHFQLRTNPTTSTYMTHEAEDELLRSALHKFTNVDGTNGRTVLPFPHDMFYVPEFRKYDEMSYSERIDQIRDELSLNERSSLEAFILLCSGGTLENSSFGEFLHWWAMSGYTYQGCMDCLISYKFKDGQSAFARRFWEEAAGTGRLGYVFGCPVRSVVNERDAVRVTARDGREFAAKRLVCTIPLNVLSSVHFSPPLSPQRMAAANIGHVNQCVKVHAEVSCPDMRSWSGISYPFNKLAYAIGDGTTPAGNTHIVCLGGAHNHIQPEEDVEATKMAVENMSPGNMDIKRLVFHNWCKDEFAKGGWFFAPPQLLSKSLDELRARHGNVLFANSDWALGWRGFIDGAIEEGTRAAVTVIEELRPAPAVRSHL

SEQ ID NO: 1065 - DNA, 1485 bp, synthetic construct
  misc_feature 1..1485: note = Variant of monoamine oxidase
  source 1..1485: mol_type = other DNA
atgaccagccgcgacggctatcagtggaccccggaaacgggtctgacccagggcgtaccgtccctgggtgtcatttcgccgccgactaacatcgaagataccgataaggacgggccttgggatgtcattgtcattgggggcgggtattgtgggctgaccgcaacccgtgatttaaccgtcgcagggttcaagacgctgctgctggaggcccgtgatcgtattggtggccgctcctggagcagtaatattgacggttacccgtatgagatgggtggcacttgggttcattggcatcaatctcacgtgtggcgtgaaatcacgcgttataaaatgcacaatgcgctgtctaaatcatttaacttttcacgtggcgtgaatcacttccaactgcgtaccaatccgaccaccagtacgtacatgacgcacgaagcggaggatgaactgctgcgtagcgcattgcataaattcaccaatgtcgacggcactaatggccgtacagtgttgccgttcccacatgatatgttttatgtgccggaatttcgcaagtatgacgaaatgtcatattccgaacgcattgaccagatccgcgacgaactgtctttgaacgaacgctctagtttagaggctttcattttattatgtagcggtggcaccctggaaaactccagctttggtgaatttctgcattggtgggcaatgtcgggttacacgtatcagggctgtatggattgtttaatctcctataaatttaaggatggccagagtgcgttcgcgcgtcgcttctgggaagaagccctgggcactggccgtctgggctatgtctttggttgtccggtgcgttctgtggtgaacgaacgcgacgcagtacgtgttaccgcacgtgacggtcgcgaattcgcagcgaaacgtttggtttgcacgattccgctgaacgtattgagttctgttcattttagcccaccactgtccccgcaacgcatggccgctgcgaacattggccatgttaaccagtgcgtcaaagtgcatgcggaagtcagttgcccggatatgcgttcatggtcgggtatctcctatccgttcaacaaattagcctacgctatcggcgatggcacgaccccagcgggtaatacgcatattgtgtgtcttggtggggcccataatcatatccagccggaagaggacgtggaagcaacgaagatggccgttgaaaacatgtcgcctgggaatatggatatcaaacgtctggtcttccacaactggtgcaaggatgaatttgccaaaggcgggtggttcttcgcccctccacagctgctgtcaaagagcctggatgaactgcgctgccgtcacggtaatgtcctgtttgcaaactccgattgggccttaggttggcgtggttttatcgatggtgctatcgaggagggcacccgcgcagcggttactgtaattgaggaactgcgtcctgcgcctgcggtgcgttcccacctg

SEQ ID NO: 1066 - protein, 495 aa, synthetic construct
  REGION 1..495: note = Variant of monoamine oxidase
MTSRDGYQWTPETGLTQGVPSLGVISPPTNIEDTDKDGPWDVIVIGGGYCGLTATRDLTVAGFKTLLLEARDRIGGRSWSSNIDGYPYEMGGTWVHWHQSHVWREITRYKMHNALSKSFNFSRGVNHFQLRTNPTTSTYMTHEAEDELLRSALHKFTNVDGTNGRTVLPFPHDMFYVPEFRKYDEMSYSERIDQIRDELSLNERSSLEAFILLCSGGTLENSSFGEFLHWWAMSGYTYQGCMDCLISYKFKDGQSAFARRFWEEALGTGRLGYVFGCPVRSVVNERDAVRVTARDGREFAAKRLVCTIPLNVLSSVHFSPPLSPQRMAAANIGHVNQCVKVHAEVSCPDMRSWSGISYPFNKLAYAIGDGTTPAGNTHIVCLGGAHNHIQPEEDVEATKMAVENMSPGNMDIKRLVFHNWCKDEFAKGGWFFAPPQLLSKSLDELRCRHGNVLFANSDWALGWRGFIDGAIEEGTRAAVTVIEELRPAPAVRSHL

SEQ ID NO: 1067 - DNA, 1485 bp, synthetic construct
  misc_feature 1..1485: note = Variant of monoamine oxidase
  source 1..1485: mol_type = other DNA
atgaccagccgcgacggctatcagtggaccccggaaacgggtctgacccagggcgtaccgtccctgggtgtcatttcgccgccgactaacatcgaagataccgataaggacgggccttgggatgtcattgtcattgggggcgggtattgtgggctgaccgcaacccgtgatttaaccgtcgcagggttcaagacgctgctgctggaggcccgtgatcgtattggtggccgctcctggagcagtaatattgacggttacccgtatgagatgggtggcacttgggttcattggcatcaatctcacgtgtggcgtgaaatcacgcgttataaaatgcacaacgcgctgtctccgtcatttaacttttcacgtggcgtgaatcacttccaactgcgtaccaatccgaccaccagtacgtacatgacgcacgaagcggaggatgaactgctgcgtagcgcattgcataaattcaccaatgtcgacggcactaatggccgtacagtgttgccgttcccacatgatatgttttatgtgccggaatttcgcaagtatgacgaaatgtcatattccgaacgcattgaccagatccgcgacgaactgtctttgaacgaacgctctagtttagaggctttcattttattatgtagcggtggcaccctggaaaactccagctttggtgaatttctgcattggtgggcaatgtcgggttacacgtatcagggctgtatggattgtttaatctcctataaatttaaggatggccagagtgcgttcgcgcgtcgcttctttgaagaagccgctggcactggccgtctgggctatgtctttggttgtccggtgcgttctgtggtgaacgaacgcgacgcagtacgtgttaccgcacgtgacggtcgcgaattcgcagcgaaacgtttggtttgcacgattccgctgaacgtattgagttctgttcattttagcccaccactgtccccgcaacgcatggccgctgcgaacattggccatgttaaccagtgcgtcaaagtgcatgcggaagtcagttgtccggatatgcgttcatggtcgggtatctcctatccgttcaacaaattagcctacgctatcggcgatggcacgaccccagcgggtaatacgcatattgtgtgccttgggggggcccataatcatatccagccggaagaggacgtggaagcaacgaagatggccgttgaaaacatgtcgcctgggaatatggatatcaaacgtctggtcttccacaactggtgcaaggatgaatttgccaaaggcgggtggttcttcgcccctccacagctgctgtcaaagagcctggatgaactgcgctgccgtcacggtaatgtcctgtttgcaaactccgattgggccttaggttggcgtggttttatcgatggtgctatcgaggagggcacccgcgcagcggttactgtaattgaggaactgcgtcctgcgcctgcggtgcgttcccacctg

SEQ ID NO: 1068 - protein, 495 aa, synthetic construct
  REGION 1..495: note = Variant of monoamine oxidase
MTSRDGYQWTPETGLTQGVPSLGVISPPTNIEDTDKDGPWDVIVIGGGYCGLTATRDLTVAGFKTLLLEARDRIGGRSWSSNIDGYPYEMGGTWVHWHQSHVWREITRYKMHNALSPSFNFSRGVNHFQLRTNPTTSTYMTHEAEDELLRSALHKFTNVDGTNGRTVLPFPHDMFYVPEFRKYDEMSYSERIDQIRDELSLNERSSLEAFILLCSGGTLENSSFGEFLHWWAMSGYTYQGCMDCLISYKFKDGQSAFARRFFEEAAGTGRLGYVFGCPVRSVVNERDAVRVTARDGREFAAKRLVCTIPLNVLSSVHFSPPLSPQRMAAANIGHVNQCVKVHAEVSCPDMRSWSGISYPFNKLAYAIGDGTTPAGNTHIVCLGGAHNHIQPEEDVEATKMAVENMSPGNMDIKRLVFHNWCKDEFAKGGWFFAPPQLLSKSLDELRCRHGNVLFANSDWALGWRGFIDGAIEEGTRAAVTVIEELRPAPAVRSHL

SEQ ID NO: 1069 - DNA, 1485 bp, synthetic construct
  misc_feature 1..1485: note = Variant of monoamine oxidase
  source 1..1485: mol_type = other DNA
atgaccagccgcgacggctatcagtggaccccggaaacgggtctgacccagggcgtaccgtccctgggtgtcatttcgccgccgactaacatcgaagataccgataaggacgggccttgggatgtcattgtcattgggggcgggtattgtgggctgaccgcaacccgtgatttaaccgtcgcagggttcaagacgctgctgctggaggcccgtgatcgtattggtggccgctcctggagcagtaatattgacggttacctgtatgagatgggtggcacttgggttcattggcatcaatctcacgtgtggcgtgaaatcacgcgttataaaatgcacaatgcgctgtctccgtcatttaacttttcacgtggcgtgaatcacttccaactgcgtaccaatccgaccaccagtacgtacatgacgcacgaagcggaggatgaactgctgcgtagcgcattgcataaattcaccaatgtcgacggcactaatggccgtacagtgttgccgttcccacatgatatgttttatgtgccggaatttcgcaagtatgacgaaatgtcatattccgaacgcattgaccagatccgcgacgaactgtctttgaacgaacgctctagtttagaggctttcattttattatgtagcggtggcaccctggaaaactccagctttggtgaatttctgcattggtgggcaatgtcgggttacacgtatcagggctgtattgattgtttaatgtcctataaatttaaggatggccagagtgcgttcgcgcgtagcttctttgaagaagccctgggcactggccgtctgggctatgtctttggttgtccggtgcgttctgtggtgaacgaacgcgacgcagtacgtgttaccgcacgtgacggtcgcgaattcgcagcgaaacgtttggtttgcacgattccgctgaacgtattgagttctgttcattttagcccaccactgtccccgcaacgcatggccgctgcgaacattggccatgttaaccagggcgtcaaagtgcatgcggaagtcagttgcccggatatgcgttcatggtcgggtatctcctatccgttcaacaaattagcctacgctatcggcgatggcacgaccccagcgggtaatacgcatattgtgtgccttgggggggcccataatcatatccagccggaagaggacgtggaagcaacgaagatggccgttgaaaacatgtcgcctgggaatatggatatcaaacgtctggtcttccacaactggtgcaaggatgaatttgccaaaggcgggtggttcttcgcccctccacagctgctgtcaaagagcctggatgaactgcgctgtcgtcacggtaatgtcctgtttgcaaactccgattgggccttaggttggcgtggttttatcgatggtgctatcgaggagggcacccgcgcagcggttactgtaattgaggaactgcgtcctgcgcctgcggtgcgttcccacctg

SEQ ID NO: 1070 - protein, 495 aa, synthetic construct
  REGION 1..495: note = Variant of monoamine oxidase
MTSRDGYQWTPETGLTQGVPSLGVISPPTNIEDTDKDGPWDVIVIGGGYCGLTATRDLTVAGFKTLLLEARDRIGGRSWSSNIDGYLYEMGGTWVHWHQSHVWREITRYKMHNALSPSFNFSRGVNHFQLRTNPTTSTYMTHEAEDELLRSALHKFTNVDGTNGRTVLPFPHDMFYVPEFRKYDEMSYSERIDQIRDELSLNERSSLEAFILLCSGGTLENSSFGEFLHWWAMSGYTYQGCIDCLMSYKFKDGQSAFARSFFEEALGTGRLGYVFGCPVRSVVNERDAVRVTARDGREFAAKRLVCTIPLNVLSSVHFSPPLSPQRMAAANIGHVNQGVKVHAEVSCPDMRSWSGISYPFNKLAYAIGDGTTPAGNTHIVCLGGAHNHIQPEEDVEATKMAVENMSPGNMDIKRLVFHNWCKDEFAKGGWFFAPPQLLSKSLDELRCRHGNVLFANSDWALGWRGFIDGAIEEGTRAAVTVIEELRPAPAVRSHL

SEQ ID NO: 1071 - DNA, 1485 bp, synthetic construct
  misc_feature 1..1485: note = Variant of monoamine oxidase
  source 1..1485: mol_type = other DNA
atgaccagccgcgacggctatcagtggaccccggaaacgggtctgacccagggcgtaccgtccctgggtgtcatttcgccgccgactaacatcgaagataccgataaggacgggccttgggatgtcattgtcattgggggcgggtattgtgggctgaccgcaacccgtgatttaaccgtcgcagggttcaagacgctgctgctggaggcccgtgatcgtattggtggccgctcctggagcagtaatattgacggttacccgtatgagatgggtggcacttgggttcattggcatcaatctcacgtgtggcgtgaaatcacgcgttataaaatgcacggggcgctgtctccgtcatttaacttttcacgtggcgtgaatcacttccaactgcgtaccaatccgaccaccagtacgtacatgacgcacgaagcggaggatgaactgctgcgtagcgcattgcataaattcaccaatgtcgacggcactaatggccgtacagtgttgccgttcccacatgatatgttttatgtgccggaatttcgcaagtatgacgaaatgtcatattccgaacgcattgaccagatccgcgacgaactgtctttgaacgaacgctctagtttagaggctttcattttattatgtagcggtggcaccctggaaaactccagctttggtgaatttctgcattggtgggcaatgtcgggttacacgtatcagggctgtattgattgtttaatttcctataaatttaaggatggccagagtgcgttcgcgcgtcgcttctgggaagaagccgctggcactggccgtctgggctatgtctttggttgtccggtgcgttctgtggtgaacgaacgcgacgcagtacgtgttaccgcacgtgacggtcgcgaattcgcagcgaaacgtttggtttgcacgattccgctgaacgtattgagttctgttcattttagcccaccactgtccccgcaacgcatggccgctgcgaacattggccatgttaaccagtgcgtcaaagtgcatgcggaagtcagttgtccggatatgcgttcatggtcgggtatctcctatccgttcaacaaattagcctacgctatcggcgatggcacgaccccagcgggtaatacgcatattgtggctcttggtggggcccataatcatatccagccggaagaggacgtggaagcaacgaagatggccgttgaaaacatgtcgcctgggaatatggatatcaaacgtctggtcttccacaactggtgcaaggatgaatttgccaaaggcgggtggttcttcgcccctccacagctgctgtcaaagagcctggatgaactgcgctgccgtcacggtaatgtcctgtttgcaaactccgattgggccttaggttggcgtggttttatcgatggtgctatcgaggagggcacccgcgcagcggttactgtaattgaggaactgcgtcctgcgcctgcggtgcgttcccacctg

SEQ ID NO: 1072 - protein, 495 aa, synthetic construct
  REGION 1..495: note = Variant of monoamine oxidase
MTSRDGYQWTPETGLTQGVPSLGVISPPTNIEDTDKDGPWDVIVIGGGYCGLTATRDLTVAGFKTLLLEARDRIGGRSWSSNIDGYPYEMGGTWVHWHQSHVWREITRYKMHGALSPSFNFSRGVNHFQLRTNPTTSTYMTHEAEDELLRSALHKFTNVDGTNGRTVLPFPHDMFYVPEFRKYDEMSYSERIDQIRDELSLNERSSLEAFILLCSGGTLENSSFGEFLHWWAMSGYTYQGCIDCLISYKFKDGQSAFARRFWEEAAGTGRLGYVFGCPVRSVVNERDAVRVTARDGREFAAKRLVCTIPLNVLSSVHFSPPLSPQRMAAANIGHVNQCVKVHAEVSCPDMRSWSGISYPFNKLAYAIGDGTTPAGNTHIVALGGAHNHIQPEEDVEATKMAVENMSPGNMDIKRLVFHNWCKDEFAKGGWFFAPPQLLSKSLDELRCRHGNVLFANSDWALGWRGFIDGAIEEGTRAAVTVIEELRPAPAVRSHL

SEQ ID NO: 1073 - DNA, 1485 bp, synthetic construct
  misc_feature 1..1485: note = Variant of monoamine oxidase
  source 1..1485: mol_type = other DNA
atgaccagccgcgacggctatcagtggaccccggaaacgggtctgacccagggcgtaccgtccctgggtgtcatttcgccgccgactaacatcgaagataccgataaggacgggccttgggatgtcattgtcattgggggcgggtattgtgggctgaccgcaacccgtgatttaaccgtcgcagggttcaagacgctgctgctggaggcccgtgatcgtattggtggccgctcctggagcagtaatattgacggttacccgtatgagatgggtggcacttgggttcattggcatcaatctcacgtgtggcgtgaaatcacgcgttataaaatgcacaacgcgctgtctccatcatttaacttttcacgtggcgtgaatcacttccaactgcgtaccaatccgaccaccagtacgtacatgacgcacgaagcggaggatgaactgctgcgtagcgcattgcataaattcaccaatgtcgacggcactaatggccgtacagtgttgccgttcccacatgatatgttttatgtgccggaatttcgcaagtatgacgaaatgtcatattccgaacgcattgaccagatccgcgacgaactgtctttgaacgaacgctctagtttagaggctttcattttattatgtagcggtggcaccctggaaaactccagctttggtgaatttctgcattggtgggcaatgtcgggttacacgtatcagggctgtattgattgtttaatttcctataaatttaaggatggccagagtgcgttcgcgcgtcgcttctgggaagaagccgctggcactggccgtctgggctatgtctttggttgtccggtgcgttctgtggtgaacgaacgcgacgcagtacgtgttaccgcacgtgacggtcgcgaattcgcagcgaaacgtttggtttgcacgattccgctgaacgtattgagttctgttcattttagcccaccactgtccccgcaacgcatggccgctgcgaacattggccatgttaaccagtgcgtcaaagtgcatgcggaagtcagttgtccggatatgcgttcatggtcgggtatctcctatccgttcaacaaattagcctacgctatcggcgatggcacgaccccagcgggtaatacgcatattgtgtgtcttggtggggcccataatcatatccagccggaagaggacgtggaagcaacgaagatggccgttgaaaacatgtcgcctgggaatatggatatcaaacgtctggtcttccacaactggtgcaaggatgaatttgccaaaggcgggtggttcttcgcccctccacagctgctgtcaaagagcctggatgaactgcgctgccgtcacggtaatgtcctgtttgcaaactccgattgggccttaggttggcgtggttttatcgatggtgctatcgaggagggcacccgcgcagcggttactgtaattgaggaactgcgtcctgcgcctgcggtgcgttcccacctg

SEQ ID NO: 1074 - protein, 495 aa, synthetic construct
  REGION 1..495: note = Variant of monoamine oxidase
MTSRDGYQWTPETGLTQGVPSLGVISPPTNIEDTDKDGPWDVIVIGGGYCGLTATRDLTVAGFKTLLLEARDRIGGRSWSSNIDGYPYEMGGTWVHWHQSHVWREITRYKMHNALSPSFNFSRGVNHFQLRTNPTTSTYMTHEAEDELLRSALHKFTNVDGTNGRTVLPFPHDMFYVPEFRKYDEMSYSERIDQIRDELSLNERSSLEAFILLCSGGTLENSSFGEFLHWWAMSGYTYQGCIDCLISYKFKDGQSAFARRFWEEAAGTGRLGYVFGCPVRSVVNERDAVRVTARDGREFAAKRLVCTIPLNVLSSVHFSPPLSPQRMAAANIGHVNQCVKVHAEVSCPDMRSWSGISYPFNKLAYAIGDGTTPAGNTHIVCLGGAHNHIQPEEDVEATKMAVENMSPGNMDIKRLVFHNWCKDEFAKGGWFFAPPQLLSKSLDELRCRHGNVLFANSDWALGWRGFIDGAIEEGTRAAVTVIEELRPAPAVRSHL

SEQ ID NO: 1075 - DNA, 1485 bp, synthetic construct
  misc_feature 1..1485: note = Variant of monoamine oxidase
  source 1..1485: mol_type = other DNA
atgaccagccgcgacggctatcagtggaccccggaaacgggtctgacccagggcgtaccgtccctgggtgtcatttcgccgccgactaacatcgaagataccgataaggacgggccttgggatgtcattgtcattgggggcgggtattgtgggctgaccgcaacccgtgatttaaccgtcgcagggttcaagacgctgctgctggaggcccgtgatcgtattggtggccgctcctggagcagtaatattgacggttacctgtatgagatgggtggcacttgggttcattggcatcaatcgcacgtgtggcgtgaaatcacgcgttataaaatgcacaatgcgctgtctaaatcatttaacttttcacgtggcgtgaatcacttccaactgcgtaccaatccgaccaccagtacgtacatgacgcacgaagcggaggatgaactgctgcgtagcgcattgcataaattcaccaatgtcgacggcactaatggccgtacagtgttgccgttcccacatgatatgttttatgtgccggaatttcgcaagtatgacgaaatgtcatattccgaacgcattgaccagatccgcgacgaactgtctttgaacgaacgctctagtttagaggctttcattttattatgtagcggtggcaccctggaaaactccagctttggtgaatttctgcattggtgggcaatgtcgggttacacgtatcagggctgtattgattgtttaatttcctataaatttaaggatggccagagtgcgttcgcgcgtagcttctgggaagaagccctgggcactggccgtctgggctatgtctttggttgtccggtgcgttctgtggtgaacgaacgcgacgcagtacgtgttaccgcacgtgacggtcgcgaattcgcagcgaaacgtttggtttgcacgattccgctgaacgtattgagttctgttcattttagcccaccactgtccccgcaacgcatggccgctgcgaacattggccatgttaaccagtgcgtcaaagtgcatgcggaagtcagttgtccggatatgcgttcatggtcgggtatctcctatccgttcaacaaattagcctacgctatcggcgatggcacgaccccagcgggtaatacgcatattgtgtgccttgggggggcccataatcatatccagccggaagaggacgtggaagcaacgaagatggccgttgaaaacatgtcgcctgggaatatggatatcaaacgtctggtcttccacaactggtgcaaggatgaatttgccaaaggcgggtggttcttcgcccctccacagctgctgtcaaagagcctggatgaactgcgctgccgtcacggtaatgtcctgtttgcaaactccgattgggccttaggttggcgtggttttatcgatggtgctatcgaggagggcacccgcgcagcggttactgtaattgaggaactgcgtcctgcgcctgcggtgcgttcccacctg

SEQ ID NO: 1076 - protein, 495 aa, synthetic construct
  REGION 1..495: note = Variant of monoamine oxidase
MTSRDGYQWTPETGLTQGVPSLGVISPPTNIEDTDKDGPWDVIVIGGGYCGLTATRDLTVAGFKTLLLEARDRIGGRSWSSNIDGYLYEMGGTWVHWHQSHVWREITRYKMHNALSKSFNFSRGVNHFQLRTNPTTSTYMTHEAEDELLRSALHKFTNVDGTNGRTVLPFPHDMFYVPEFRKYDEMSYSERIDQIRDELSLNERSSLEAFILLCSGGTLENSSFGEFLHWWAMSGYTYQGCIDCLISYKFKDGQSAFARSFWEEALGTGRLGYVFGCPVRSVVNERDAVRVTARDGREFAAKRLVCTIPLNVLSSVHFSPPLSPQRMAAANIGHVNQCVKVHAEVSCPDMRSWSGISYPFNKLAYAIGDGTTPAGNTHIVCLGGAHNHIQPEEDVEATKMAVENMSPGNMDIKRLVFHNWCKDEFAKGGWFFAPPQLLSKSLDELRCRHGNVLFANSDWALGWRGFIDGAIEEGTRAAVTVIEELRPAPAVRSHL

SEQ ID NO: 1077 - DNA, 1485 bp, synthetic construct
  misc_feature 1..1485: note = Variant of monoamine oxidase
  source 1..1485: mol_type = other DNA
atgaccagccgcgacggctatcagtggaccccggaaacgggtctgacccagggcgtaccgtccctgggtgtcatttcgccgccgactaacatcgaagataccgataaggacgggccttgggatgtcattgtcattgggggcgggtattgtgggctgaccgcaacccgtgatttaaccgtcgcagggttcaagacgctgctgctggaggcccgtgatcgtattggtggccgctcctggagcagtaatattgacggttacccgtatgagatgggtggcacttgggttcattggcatcaatctcacgtgtggcgtgaaatcacgcgttataaaatgcacaacgcgctgtctccatcatttaacttttcacgtggcgtgaatcacttccaactgcgtaccaatccgaccaccagtacgtacatgacgcacgaagcggaggatgaactgctgcgtagcgcattgcataaattcaccaatgtcgacggcactaatggccgtacagtgttgccgttcccacatgatatgttttatgtgccggaatttcgcaagtatgacgaaatgtcatattccgaacgcattgaccagatccgcgacgaactgtctttgaacgaacgctctagtttagaggctttcattttattatgtagcggtggcaccctggaaaactccagctttggtgaatttctgcattggtgggcaatgtcgggttacacgtatcagggctgtatggattgtttaatctcctataaatttaaggatggccagagtgcgttcgcgcgtagcttctgggaagaagccctgggcactggccgtctgggctatgtctttggttgtccggtgcgttctgtggtgaacgaacgcgacgcagtacgtgttaccgcacgtgacggtcgcgaattcgcagcgaaacgtttggtttgcacgattccgctgaacgtattgagttctgttcattttagcccaccactgtccccgcaacgcatggccgctgcgaacattggccatgttaaccagtgcgtcaaagtgcatgcggaagtcagttgtccggatatgcgttcatggtcgggtatctcctatccgttcaacaaattagcctacgctatcggcgatggcacgaccccagcgggtaatacgcatattgtgtgccttgggggggcccataatcatatccagccggaagaggacgtggaagcaacgaagatggccgttgaaaacatgtcgcctgggaatatggatatcaaacgtctggtcttccacaactggtgcaaggatgaatttgccaaaggcgggtggttcttcgcccctccacagctgctgtcaaagagcctggatgaactgcgctgccgtcacggtaatgtcctgtttgcaaactccgattgggccttaggttggcgtggttttatcgatggtgctatcgaggagggcacccgcgcagcggttactgtaattgaggaactgcgtcctgcgcctgcggtgcgttcccacctg

SEQ ID NO: 1078 - protein, 495 aa, synthetic construct
  REGION 1..495: note = Variant of monoamine oxidase
MTSRDGYQWTPETGLTQGVPSLGVISPPTNIEDTDKDGPWDVIVIGGGYCGLTATRDLTVAGFKTLLLEARDRIGGRSWSSNIDGYPYEMGGTWVHWHQSHVWREITRYKMHNALSPSFNFSRGVNHFQLRTNPTTSTYMTHEAEDELLRSALHKFTNVDGTNGRTVLPFPHDMFYVPEFRKYDEMSYSERIDQIRDELSLNERSSLEAFILLCSGGTLENSSFGEFLHWWAMSGYTYQGCMDCLISYKFKDGQSAFARSFWEEALGTGRLGYVFGCPVRSVVNERDAVRVTARDGREFAAKRLVCTIPLNVLSSVHFSPPLSPQRMAAANIGHVNQCVKVHAEVSCPDMRSWSGISYPFNKLAYAIGDGTTPAGNTHIVCLGGAHNHIQPEEDVEATKMAVENMSPGNMDIKRLVFHNWCKDEFAKGGWFFAPPQLLSKSLDELRCRHGNVLFANSDWALGWRGFIDGAIEEGTRAAVTVIEELRPAPAVRSHL

SEQ ID NO: 1079 - DNA, 1485 bp, synthetic construct
  misc_feature 1..1485: note = Variant of monoamine oxidase
  source 1..1485: mol_type = other DNA
atgaccagccgcgacggctatcagtggaccccggaaacgggtctgacccagggcgtaccgtccctgggtgtcatttcgccgccgactaacatcgaagataccgataaggacgggccttgggatgtcattgtcattgggggcgggtattgtgggctgaccgcaacccgtgatttaaccgtcgcagggttcaagacgctgctgctggaggcccgtgatcgtattggtggccgctcctggagcagtaatattgacggttacccgtatgagatgggtggcacttgggttcattggcatcaatcgcacgtgtggcgtgaaatcacgcgttataaaatgcacaacgcgctgtctccgtcatttaacttttcacgtggcgtgaatcacttccaactgcgtaccaatccgaccaccagtacgtacatgacgcacgaagcggaggatgaactgctgcgtagcgcattgcataaattcaccaatgtcgacggcactaatggccgtacagtgttgccgttcccacatgatatgttttatgtgccggaatttcgcaagtatgacgaaatgtcatattccgaacgcattgaccagatccgcgacgaactgtctttgaacgaacgctctagtttagaggctttcattttattatgtagcggtggcaccctggaaaactccagctttggtgaatttctgcattggtgggcaatgtcgggttacacgtatcagggctgtatggattgtttaatctcctataaatttaaggatggccagagtgcgttcgcgcgtagcttctttgaagaagccgctggcactggccgtctgggctatgtctttggtactccggtgcgttctgtggtggacgaacgcgacgcagtacgtgttaccgcacgtgacggtcgcgaattcgcagcgaaacgtttggtttgcacgattccgctgaacgtattgagttctgttcattttagcccaccactgtccccgcaacgcatggccgctgcgaacattggccatgttaaccagtgcgtcaaagtgcatgcggaagtcagttgtccggatatgcgttcatggtcgggtatctcctatccgttcaacaaattagcctacgctatcggcgatggcacgaccccagcgggtaatacgcatattgtgtgtcttggtggggcccataatcatatccagccggaagaggacgtggaagcaacgaagatggccgttgaaaacatgtcgcctgggaatatggatatcaaacgtctggtcttccacaactggtgcaaggatgaatttgccaaaggcgggtggttcttcgcccctccacagctgctgtcaaagagcctggatgaactgcgcgctcgtcacggtaatgtcctgtttgcaaactccgattgggccttaggttggcgtggttttatcgatggtgctatcgaggagggcacccgcgcagcggttactgtaattgaggaactgcgtcctgcgcctgcggtgcgttcccacctg

SEQ ID NO: 1080 - protein, 495 aa, synthetic construct
  REGION 1..495: note = Variant of monoamine oxidase
MTSRDGYQWTPETGLTQGVPSLGVISPPTNIEDTDKDGPWDVIVIGGGYCGLTATRDLTVAGFKTLLLEARDRIGGRSWSSNIDGYPYEMGGTWVHWHQSHVWREITRYKMHNALSPSFNFSRGVNHFQLRTNPTTSTYMTHEAEDELLRSALHKFTNVDGTNGRTVLPFPHDMFYVPEFRKYDEMSYSERIDQIRDELSLNERSSLEAFILLCSGGTLENSSFGEFLHWWAMSGYTYQGCMDCLISYKFKDGQSAFARSFFEEAAGTGRLGYVFGTPVRSVVDERDAVRVTARDGREFAAKRLVCTIPLNVLSSVHFSPPLSPQRMAAANIGHVNQCVKVHAEVSCPDMRSWSGISYPFNKLAYAIGDGTTPAGNTHIVCLGGAHNHIQPEEDVEATKMAVENMSPGNMDIKRLVFHNWCKDEFAKGGWFFAPPQLLSKSLDELRARHGNVLFANSDWALGWRGFIDGAIEEGTRAAVTVIEELRPAPAVRSHL

SEQ ID NO: 1081 - DNA, 1485 bp, synthetic construct
  misc_feature 1..1485: note = Variant of monoamine oxidase
  source 1..1485: mol_type = other DNA
atgaccagccgcgacggctatcagtggaccccggaaacgggtctgacccagggcgtaccgtccctgggtgtcatttcgccgccgactaacatcgaagataccgataaggacgggccttgggatgtcattgtcattgggggcgggtattgtgggctgaccgcaacccgtgatttaaccgtcgcagggttcaagacgctgctgctggaggcccgtgatcgtattggtggccgctcctggagcagtaatattgacggttacctgtatgagatgggtggcacttgggttcattggcatcaatctcacgtgtggcgtgaaatcacgcgttataaaatgcacaacgcgctgtctccatcatttaacttttcacgtggcgtgaatcacttccaactgcgtaccaatccgaccaccagtacgtacatgacgcacgaagcggaggatgaactgctgcgtagcgcattgcataaattcaccaatgtcgacggcactaatggccgtacagtgttgccgttcccacatgatatgttttatgtgccggaatttcgcaagtatgacgaaatgtcatattccgaacgcattgaccagatccgcgacgacctgtctttgaacgaacgctctagtttagaggctttcattttattatgtagcggtggcaccctggaaaactccagctttggtgaatttctgcattggtgggcaatgtcgggttacacgtatcagggctgtatggattgtttaatctcctataaatttaaggatggccagagtgcgttcgcgcgtcgcttctgggaagaagccgctggcactggccgtctgggctatgtctttggttgtccggtgcgttctgtggtgaacgaacgcgacgcagtacgtgttaccgcacgtgacggtcgcgaattcgcagcgaaacgtttggtttgcacgattccgctgaacgtattgagttctgttcattttagcccaccactgtccccgcaacgcatggccgctgcgaacattggccatgttaaccagtgcgtcaaagtgcatgcggaagtcagttgtccggatatgcgttcatggtcgggtatctcctatccgttcaacaaattagcctacgctatcggcgatggcacgaccccagcgggtaatacgcatattgtgtgccttgggggggcccataatcatatccagccggaagaggacgtggaagcaacgaagatggccgttgaaaacatgtcgcctgggaatatggatatcaaacgtctggtcttccacaactggtgcaaggatgaatttgccaaaggcgggtggttcttcgcccctccacagctgctgtcaaagagcctggatgaactgcgctgccgtcacggtaatgtcctgtttgcaaactccgattgggccttaggttggcgtggttttatcgatggtgctatcgaggagggcacccgcgcagcggttactgtaattgaggaactgcgtcctgcgcctgcggtgcgttcccacctg

SEQ ID NO: 1082 - protein, 495 aa, synthetic construct
  REGION 1..495: note = Variant of monoamine oxidase
MTSRDGYQWTPETGLTQGVPSLGVISPPTNIEDTDKDGPWDVIVIGGGYCGLTATRDLTVAGFKTLLLEARDRIGGRSWSSNIDGYLYEMGGTWVHWHQSHVWREITRYKMHNALSPSFNFSRGVNHFQLRTNPTTSTYMTHEAEDELLRSALHKFTNVDGTNGRTVLPFPHDMFYVPEFRKYDEMSYSERIDQIRDDLSLNERSSLEAFILLCSGGTLENSSFGEFLHWWAMSGYTYQGCMDCLISYKFKDGQSAFARRFWEEAAGTGRLGYVFGCPVRSVVNERDAVRVTARDGREFAAKRLVCTIPLNVLSSVHFSPPLSPQRMAAANIGHVNQCVKVHAEVSCPDMRSWSGISYPFNKLAYAIGDGTTPAGNTHIVCLGGAHNHIQPEEDVEATKMAVENMSPGNMDIKRLVFHNWCKDEFAKGGWFFAPPQLLSKSLDELRCRHGNVLFANSDWALGWRGFIDGAIEEGTRAAVTVIEELRPAPAVRSHL

SEQ ID NO: 1083 - DNA, 1485 bp, synthetic construct
  misc_feature 1..1485: note = Variant of monoamine oxidase
  source 1..1485: mol_type = other DNA
atgaccagccgcgacggctatcagtggaccccggaaacgggtctgacccagggcgtaccgtccctgggtgtcatttcgccgccgactaacatcgaagataccgataaggacgggccttgggatgtcattgtcattgggggcgggtattgtgggctgaccgcaacccgtgatttaaccgtcgcagggttcaagacgctgctgctggaggcccgtgatcgtattggtggccgctcctggagcagtaatattgacggttacccgtatgagatgggtggcacttgggttcattggcatcaatctcacgtgtggcgtgaaatcacgcgttataaaatgcacaacgcgctgtctccatcatttaacttttcacgtggcgtgaatcacttccaactgcgtaccaatccgaccaccagtacgtacatgacgcacgaagcggaggatgaactgctgcgtagcgcattgcataaattcaccaatgtcgacggcactaatggccgtacagtgttgccgttcccacatgatatgttttatgtgccggaatttcgcaagtatgacgaaatgtcatattccgaacgcattgaccagatccgcgacgaactgtctttgaacgaacgctctagtttagaggctttcattttattatgtagcggtggcaccctggaaaactccagctttggtgaatttctgcattggtgggcaatgtcgggttacacgtatcagggctgtattgattgtttaatgtcctataaatttaaggatggccagagtgcgttcgcgcgtcgcttctgggaagaagccgctggcactggccgtctgggctatgtctttggttgtccggtgcgttctgtggtgaacgaacgcgacgcagtacgtgttaccgcacgtgacggtcgcgaattcgcagcgaaacgtttggtttgcacgattccgctgaacgtattgagttctgttcattttagcccaccactgtccccgcaacgcatggccgctgcgaacattggccatgttaaccagtgcgtcaaagtgcatgcggaagtcagttgtccggatatgcgttcatggtcgggtatctcctatccgttcaacaaattagcctacgctatcggcgatggcacgaccccagcgggtaatacgcatattgtgtgccttgggggggcccataatcatatccagccggaagaggacgtggaagcaacgaagatggccgttgaaaacatgtcgcctgggaatatggatatcaaacgtctggtcttccacaactggtgcaaggatgaatttgccaaaggcgggtggttcttcgcccctccacagctgctgtcaaagagcctggatgaactgcgctgccgtcacggtaatgtcctgtttgcaaactccgattgggccttaggttggcgtggttttatcgatggtgctatcgaggagggcacccgcgcagcggttactgtaattgaggaactgcgtcctgcgcctgcggtgcgttcccacctg

SEQ ID NO: 1084 - protein, 495 aa, synthetic construct
  REGION 1..495: note = Variant of monoamine oxidase
MTSRDGYQWTPETGLTQGVPSLGVISPPTNIEDTDKDGPWDVIVIGGGYCGLTATRDLTVAGFKTLLLEARDRIGGRSWSSNIDGYPYEMGGTWVHWHQSHVWREITRYKMHNALSPSFNFSRGVNHFQLRTNPTTSTYMTHEAEDELLRSALHKFTNVDGTNGRTVLPFPHDMFYVPEFRKYDEMSYSERIDQIRDELSLNERSSLEAFILLCSGGTLENSSFGEFLHWWAMSGYTYQGCIDCLMSYKFKDGQSAFARRFWEEAAGTGRLGYVFGCPVRSVVNERDAVRVTARDGREFAAKRLVCTIPLNVLSSVHFSPPLSPQRMAAANIGHVNQCVKVHAEVSCPDMRSWSGISYPFNKLAYAIGDGTTPAGNTHIVCLGGAHNHIQPEEDVEATKMAVENMSPGNMDIKRLVFHNWCKDEFAKGGWFFAPPQLLSKSLDELRCRHGNVLFANSDWALGWRGFIDGAIEEGTRAAVTVIEELRPAPAVRSHL

What is claimed is:

1. An engineered monoamine oxidase comprising a polypeptide sequence comprising at least 80%, 85%, 86%, 87%, 88%, 89%, 90%, 91%, 92%, 93%, 94%, 95%, 96%, 97%, 98%, 99% sequence identity to SEQ ID NOs: 6 and/or 414, or a functional fragment thereof, wherein said engineered monoamine oxidase polypeptide comprises at least one substitution or substitution set in said polypeptide sequence, and wherein the amino acid positions of said polypeptide sequence are numbered with reference to SEQ ID NOs: 6 and/or 414.

2. The engineered monoamine oxidase polypeptide of claim 1, wherein said polypeptide sequence comprises at least 80%, 85%, 86%, 87%, 88%, 89%, 90%, 91%, 92%, 93%, 94%, 95%, 96%, 97%, 98%, 99% sequence identity to SEQ ID NO: 6, wherein said engineered monoamine oxidase polypeptide comprises at least one substitution at one or more positions selected from 429, 149, 198, 246, 260, 266, and 421, and wherein the amino acid positions of said polypeptide sequence are numbered with reference to SEQ ID NO: 6.

3. The engineered monoamine oxidase polypeptide of claim 1, wherein said polypeptide sequence comprises at least 80%, 85%, 86%, 87%, 88%, 89%, 90%, 91%, 92%, 93%, 94%, 95%, 96%, 97%, 98%, 99% sequence identity to SEQ ID NO: 6, wherein said engineered monoamine oxidase polypeptide comprises at least one substitution selected from 429G, 149M, 198D, 246M, 260S, 266L, and 421S, and wherein the amino acid positions of said polypeptide sequence are numbered with reference to SEQ ID NO: 6.

4. The engineered monoamine oxidase polypeptide of claim 1, wherein said polypeptide sequence comprises at least 80%, 85%, 86%, 87%, 88%, 89%, 90%, 91%, 92%, 93%, 94%, 95%, 96%, 97%, 98%, 99% sequence identity to SEQ ID NO: 6, wherein said engineered monoamine oxidase polypeptide comprises at least one substitution selected from A429G, L149M, E198D, I246M, R260S, A266L, and C421S, wherein the amino acid positions of said polypeptide sequence are numbered with reference to SEQ ID NO: 6.

5. The engineered monoamine oxidase polypeptide of claim 1, wherein said polypeptide sequence comprises at least 80%, 85%, 86%, 87%, 88%, 89%, 90%, 91%, 92%, 93%, 94%, 95%, 96%, 97%, 98%, 99% sequence identity to SEQ ID NO: 6, wherein said engineered monoamine oxidase polypeptide comprises at least one substitution or substitution set in said polypeptide sequence at one or more positions selected from 13, 32/65/135/246/284, 32/135/284, 32/284, 47/197, 55/347/348, 61, 65/135, 65/190, 65/246, 65/284, 79, 80, 82, 85, 87, 87/185, 93, 100, 100/144/421/447, 100/144/447, 104, 107, 113, 114, 115, 117, 127, 135, 136, 144, 144/447, 145, 146, 147, 149, 149/157, 153, 155, 161, 162, 166, 167, 169, 170, 174, 177, 181, 184, 185, 187/242, 193, 196, 198, 199, 208, 211, 218, 219, 219/332, 221, 229, 232, 234, 238, 239, 240, 242, 246, 250, 252, 254, 260, 262/266/421, 262/421/447, 266/447, 277, 277/347, 284, 290, 292, 294, 298, 300, 306, 310, 323, 332, 338, 347, 349, 359, 361, 366, 381, 385, 386, 387, 392, 393, 400, 407, 411/445, 413, 418, 421, 425, 429, 433, 434, 441, 444, 445, 447, 449, 452, 475, and 483, and wherein the amino acid positions of said polypeptide sequence are numbered with reference to SEQ ID NO: 6.

6. The engineered monoamine oxidase polypeptide of claim 1, wherein said polypeptide sequence comprises at least 80%, 85%, 86%, 87%, 88%, 89%, 90%, 91%, 92%, 93%, 94%, 95%, 96%, 97%, 98%, 99% sequence identity to SEQ ID NO: 6, wherein said engineered monoamine oxidase polypeptide comprises at least one substitution or substitution set in said polypeptide sequence at one or more positions selected from 79, 80, 87, 146, 149, 219/332, 238, 260, 262/266/421, 338, and 429, and wherein the amino acid positions of said polypeptide sequence are numbered with reference to SEQ ID NO: 6.

7. The engineered monoamine oxidase polypeptide of claim 1, wherein said polypeptide sequence comprises at least 80%, 85%, 86%, 87%, 88%, 89%, 90%, 91%, 92%, 93%, 94%, 95%, 96%, 97%, 98%, 99% sequence identity to SEQ ID NO: 6, wherein said engineered monoamine oxidase polypeptide comprises at least one substitution or substitution set in said polypeptide sequence at one or more positions selected from 79, 79/80, 79/80/332/429, 79/93, 79/93/238/386/429, 79/93/386, 79/183/284/332, 79/238, 79/238/332/429, 79/238/429, 80, 80/183/284/332/381/386/429, 80/188/190/332/386, 80/237/332, 80/238/332, 80/238/386/429, 80/284, 80/284/386, 80/332, 80/332/381/386, 80/332/386, 80/381, 80/386, 80/386/429, 80/429, 82, 82/87, 82/87/113, 82/87/113/117/218, 82/87/113/117/219, 82/87/113/117/219/418, 82/87/113/117/260/338, 82/87/113/117/338/418, 82/87/113/421, 82/87/117, 82/87/117/218/421, 82/87/117/260/338/421, 82/87/117/338/418, 82/87/218, 82/87/218/219/338, 82/87/218/219/421, 82/87/218/338, 82/87/219, 82/87/219/421, 82/87/338, 82/87/338/418, 82/87/338/421, 82/113/218/338, 82/113/218/338/418, 82/113/219/338, 82/113/338, 82/218/219/421, 82/260/338/421, 82/338/418/421, 82/418, 87, 87/113, 87/113/117/219/338/418/421, 87/113/117/260/338/421, 87/113/117/418/421, 87/113/218/219/260/338, 87/113/219/421, 87/113/260, 87/117, 87/117/218/219, 87/117/219/310/338, 87/218, 87/218/219, 87/218/219/338, 87/218/418, 87/219, 87/219/338, 87/219/418, 87/260, 87/310, 87/310/338, 87/338, 87/418, 87/421, 93/184/429, 93/238, 93/238/284, 93/238/386, 93/238/386/429, 100, 100/143/145/146/149/198/242/347/348/445/447, 100/143/145/149/347/447, 100/145/146/149, 100/145/146/149/154/348/445, 100/145/146/149/198, 100/145/146/149/198/242/250/252/347/348/447, 100/145/146/149/205/347/445/447, 100/145/146/149/242/445, 100/145/146/149/250/277/347/348/447, 100/145/149/154/246/277, 100/145/149/198/242/246/277/348/447, 100/145/149/198/242/246/445/447, 100/145/149/198/242/277/347/348/447, 100/145/149/198/252/348/445, 100/145/149/205, 100/145/149/242/246/277/347/445, 100/145/149/242/246/347/348/445/447, 100/145/149/242/445/447, 100/145/149/246/252/277/347/445/447, 100/145/149/246/347/445, 100/145/149/277/348/445, 100/145/149/347/445/447, 100/145/198/242/246/348, 100/145/198/277/348/445, 100/145/198/300, 100/145/205/246/277/348/445, 100/145/205/277/348, 100/145/242/246/277/445/447, 100/145/246/347/348/445, 100/145/277/347, 100/145/348, 100/146/149/198/242/246/277/347/348/445/447, 100/146/198/347/348/447, 100/146/198/445, 100/146/242/277/447, 100/146/250/447, 100/146/347/348/445/447, 100/149/198, 100/149/242/246/277/347/348/445, 100/149/242/246/277/347/348/447, 100/149/242/347/348/447, 100/149/246/277/348/445, 100/149/246/447, 100/149/250/347/447, 100/198/205/348, 100/198/277/347/348, 100/198/347/348, 100/198/347/348/445, 100/198/347/445, 100/198/447, 100/242/246/277, 100/242/246/347, 100/242/277/348, 100/242/347/348/445, 100/242/347/348/445/447, 100/242/348/445, 100/246/277/348/445, 100/277/347/445/447, 100/277/348, 100/277/348/447, 100/347/348/445, 100/347/447, 100/445/447, 110/338/418, 113/218/338/421, 113/338, 113/338/421, 117/219, 117/260, 121/198/347/445/447, 145/146/149/154/246/277/347/348, 145/146/149/198/242/252/277/347, 145/146/149/198/277/445/447, 145/146/149/205/348/447, 145/146/149/250/277/347/348/447, 145/146/149/277/347, 145/146/149/347/348, 145/146/198/205/242/277/348/447, 145/146/198/445/447, 145/146/246/277/447, 145/146/246/347/348/447, 145/146/277/347, 145/146/347/447, 145/149/198/205/348, 145/149/198/242/246/277/347/447, 145/149/198/242/246/348, 145/149/198/242/277/347, 145/149/198/246/447, 145/149/198/347/447, 145/149/205/242/347/348/445, 145/149/205/246/250/252, 145/149/205/277/445, 145/149/242, 145/149/242/348, 145/149/246, 145/149/246/347/445, 145/149/246/447, 145/149/347/348/445, 145/149/347/447, 145/149/447, 145/155/445/447, 145/198/205/348, 145/246, 145/246/252/347/447, 145/250/252/348, 145/252/348/447, 145/255, 145/277/347/445, 145/277/348/447, 145/347/348/445/447/491, 145/445/447, 146/149/151/246/348, 146/149/242/246/445, 146/149/246/252/447, 146/149/277/348/447, 146/198/246/277, 146/198/277/348/447, 146/242, 146/242/246/277/347/348/445/447, 146/246/277/348/445/447, 146/277, 146/277/347/348, 146/277/347/445/447, 146/277/445/447, 146/347/348/447, 146/348, 146/445/447, 149, 149/198/277/347/348, 149/198/348, 149/198/445, 149/242/246, 149/242/246/348/445, 149/347/348/445/447, 149/445, 184, 184/284, 184/284/429, 184/386, 198/242/348, 198/246, 198/250, 198/277/348/447, 198/445, 205, 205/246/347, 205/252/347/445/447, 205/347/348/445/447, 218, 218/260/338, 219, 219/338/418, 219/421, 238, 238/242/284, 238/284/386/429, 238/332/429, 238/381/429, 238/386, 238/429, 242, 242/277/347/348, 242/284/381/429, 242/348, 242/445/447, 246, 246/277/348/447, 246/445/447, 260, 260/338, 260/338/418/421, 277/347/348/445, 277/347/447, 284, 284/332, 284/386, 284/386/429, 310/338/418, 310/418/421, 332, 332/386, 332/429, 338, 338/418, 347/348/445, 347/348/447, 348, 348/445/447, 348/447, 386, 386/429, 418, 429, and 447, and wherein the amino acid positions of said polypeptide sequence are numbered with reference to SEQ ID NO: 6.

8. The engineered monoamine oxidase polypeptide of claim 1, wherein said polypeptide sequence comprises at least 80%, 85%, 86%, 87%, 88%, 89%, 90%, 91%, 92%, 93%, 94%, 95%, 96%, 97%, 98%, 99% sequence identity to SEQ ID NO: 6, wherein said engineered monoamine oxidase polypeptide comprises at least one substitution or substitution set in said polypeptide sequence at one or more positions selected from 80/429, 87/113/117/260/338/421, 87/421, 100/145/146/149/198/242/250/252/347/348/447, 100/145/149/198/242/277/347/348/447, 110/338/418, 145/149/205/246/250/252, 145/246/252/347/447, 145/252/348/447, 238/386/429, and 242/284/381/429, and wherein the amino acid positions of said polypeptide sequence are numbered with reference to SEQ ID NO: 6.

9. The engineered monoamine oxidase polypeptide of claim 1, wherein said polypeptide sequence comprises at least 80%, 85%, 86%, 87%, 88%, 89%, 90%, 91%, 92%, 93%, 94%, 95%, 96%, 97%, 98%, 99% sequence identity to SEQ ID NO: 414, wherein said engineered monoamine oxidase polypeptide comprises at least one substitution or substitution set in said polypeptide sequence at one or more positions selected from 87/113/145/198/242/246/262/266, 87/117/149/242, 87/117/242/260/266, 87/145/149/198/447, 87/149/242/260/266, 87/149/260/262/266/381, 87/198, 87/242/246/260/262/266/338, 87/284/338/347, 113/117/146/149/260/262, 113/117/266/381, 113/117/447, 113/145/146/149/242/447, 113/242/347, 113/242/381, 117/145/146/262/284, 117/145/149/284/447, 117/149, 117/198, 117/198/262, 117/242/246/260/266/284/381, 117/242/260/262, 117/246/260/262/381, 117/246/284, 117/266, 145/146/149/260/262/338/347, 145/146/242/260/262/338/347/447, 145/149/198/260/266/338/347, 145/149/260/266/338/347/381/447, 146/149/260/262/347, 149/198/246/260/266/421, 198/447, 242, 242/246, 242/246/338/347, 242/260/262/338, 242/381, 246, 260/262/277/284/447, 260/266, 262, 347/381, and 447, and wherein the amino acid positions of said polypeptide sequence are numbered with reference to SEQ ID NO: 414.

10. The engineered monoamine oxidase polypeptide of claim 1, wherein said polypeptide sequence comprises at least 80%, 85%, 86%, 87%, 88%, 89%, 90%, 91%, 92%, 93%, 94%, 95%, 96%, 97%, 98%, 99% sequence identity to SEQ ID NO: 414, wherein said engineered monoamine oxidase polypeptide comprises at least one substitution or substitution set in said polypeptide sequence at one or more positions selected from 87/145/149/198/447, 87/149/260/262/266/381, 113/117/146/149/260/262, 117/145/149/284/447, 145/149/198/260/266/338/347, 146/149/260/262/347, and 149/198/246/260/266/421, and wherein the amino acid positions of said polypeptide sequence are numbered with reference to SEQ ID NO: 414.

11. The engineered monoamine oxidase polypeptide of claim 1, wherein said engineered monoamine oxidase polypeptide comprises an amino acid sequence with at least 80% sequence identity to any even-numbered sequence set forth in SEQ ID NOs: 6-1084.

12. The engineered monoamine oxidase polypeptide of claim 1, wherein said engineered monoamine oxidase polypeptide comprises a polypeptide sequence set forth in the even numbered sequences of SEQ ID NOs: 6-1084.

13. The engineered monoamine oxidase polypeptide of claim 1, wherein said engineered monoamine oxidase polypeptide comprises a polypeptide sequence that exhibits at least one improved property compared to the engineered monoamine oxidase polypeptide of SEQ ID NOs: 6 and/or 414.

14. The engineered monoamine oxidase polypeptide of claim 13, wherein said improved property comprises improved production of Compound 2

[chemical structure]

15. The engineered monoamine oxidase polypeptide of claim 13, wherein said improved property comprises reduced enzyme loading for the conversion of Compound 1 [chemical structure]
to Compound 2 [chemical structure]
as compared to a reference sequence of SEQ ID NO: 6 or 414.

16. The engineered monoamine oxidase polypeptide of claim 13, wherein said improved property comprises 2-fold, 5-fold, 10-fold, or more activity for the conversion of Compound 1 [chemical structure]
to Compound 2 [chemical structure]
as compared to a reference sequence of SEQ ID NO: 6 or 414.

17. The engineered monoamine oxidase polypeptide of claim 1, wherein said engineered monoamine oxidase polypeptide is purified.

18. The engineered monoamine oxidase polypeptide of claim 1, wherein said engineered monoamine oxidase polypeptide is immobilized on a solid support.

19. A composition comprising at least one engineered monoamine oxidase polypeptide provided in claim 1.

20. An engineered polynucleotide encoding at least one engineered monoamine oxidase polypeptide of claim 1.

21. An engineered polynucleotide sequence encoding at least one engineered polypeptide, wherein said polynucleotide sequence comprises at least 80%, 85%, 86%, 87%, 88%, 89%, 90%, 91%, 92%, 93%, 94%, 95%, 96%, 97%, 98%, 99%, or more sequence identity to SEQ ID NOs: 5 and/or 413, wherein the polynucleotide sequence of said polypeptide comprises at least one substitution at one or more positions.

22. The engineered polynucleotide sequence of claim 20, wherein said polynucleotide sequence comprises at least 80%, 85%, 86%, 87%, 88%, 89%, 90%, 91%, 92%, 93%, 94%, 95%, 96%, 97%, 98%, 99%, or more sequence identity to SEQ ID NOs: 5 and/or 413.

23. The engineered polynucleotide sequence of claim 20, wherein said polynucleotide sequence comprises SEQ ID NOs: 5 and/or 413.

24. An engineered polynucleotide comprising any of the odd-numbered sequences set forth in SEQ ID NOs: 5-1083.

25. A vector comprising the engineered polynucleotide of claim 20.

26. The vector of claim 25, further comprising at least one control sequence.

27. A host cell comprising the vector of claim 25.

28. The host cell of claim 27, wherein said host cell produces at least one engineered monoamine oxidase polypeptide.

29. A method of producing an engineered monoamine oxidase polypeptide in a host cell, comprising culturing the host cell of claim 27, in a culture medium under suitable conditions, such that at least one engineered monoamine oxidase polypeptide is produced.

30. The method of claim 27, further comprising the step of recovering said engineered monoamine oxidase polypeptide.

31. The method of claim 29, further comprising the step of purifying said at least one engineered monoamine oxidase polypeptide.

32. A method of preparing a substantially stereomerically pure compound according to structural Formula II: [chemical structure]
including salts and hydrates thereof, wherein:
A is O, CR¹R², —C═C—, or —CH₂—CH₂—, wherein R¹ and R² are each independently selected from —H, —COOH, —X, —NH₂, —CH₂NHC(NH)NH₂, —CX₃, —CH₃, —CH₂CH₃, and wherein X is selected from F, Cl, and Br;
the method comprising contacting an amine compound according to structural Formula I [chemical structure]
wherein A is as defined for structural Formula II, with oxygen in the presence of an engineered monoamine oxidase enzyme of claim 1 with a co-factor under conditions in which the engineered monoamine oxidase enzyme oxidizes the amine compound of structural Formula I to a corresponding imine compound of structural Formula II.

33. The method of claim 32, wherein the co-factor is non-covalently associated with the engineered monoamine oxidase enzyme, wherein the co-factor is selected from the group consisting of FAD, FMN, NAD, and NADP.

34. The method of claim 32, further comprising a component catalyzing a disproportionation of hydrogen peroxide (H₂O₂) to molecular oxygen and water, wherein the component is selected from the group consisting of Pd, Fe, and a catalase enzyme.

35. A method of preparing a mixture comprising a substantially enantiomerically pure aminosulfonate compound according to structural Formula III(a) and a substantially enantiomerically pure aminosulfonate compound according to structural Formula III(b): [chemical structure]
including salts and hydrates thereof, wherein:
A is O, CR¹R², —C═C—, or —CH2-CH2-, wherein R1 and R2 are each independently selected from —H, —COOH, —X, —NH2, —CH2NHC(NH)NH2, —CX3, —CH3, —CH2CH3, and wherein X is selected from F, Cl, and Br;
the method comprising contacting an amine compound according to structural Formula I [chemical structure]
wherein A is as defined for structural Formula III with oxygen in the presence of an engineered monoamine oxidase enzyme of claim 1 associated with a co-factor and with bisulfite under conditions which yield the mixture comprising a substantially enantiomerically aminosulfonate compound according to structural Formula III(a) and a substantially enantiomerically aminosulfonate compound according to structural Formula III(b).

36. The method of claim 35 in which the bisulfite is added to the reaction before, after, or simultaneously with the engineered monoamine oxidase.

37. The method of claim 35 in which the amine compound according to structural Formula I is contacted with oxygen and the engineered monoamine oxidase enzyme associated with a co-factor before addition of the bisulfite.

38. A method of preparing a substantially enantiomerically pure aminonitrile compound according to structural Formula IV(a): [chemical structure]
including salts and hydrates thereof, wherein:
A is O, CR¹R², —C═C—, or —CH₂—CH₂—, wherein R¹ and R² are each independently selected from —H, —COOH, —X, —NH₂, —CH₂NHC(NH)NH₂, —CX₃, —CH₃, —CH₂CH₃, and wherein X is selected from F, Cl, and Br;
the method comprising contacting an amine compound according to structural Formula I [chemical structure]
wherein A is as defined for structural Formula IV with oxygen in the presence of an engineered monoamine oxidase enzyme of claim 1 associated with a co-factor and with bisulfite under conditions which yield a mixture comprising a substantially enantiomerically pure aminosulfonate compound according to structural Formula III(a) and a substantially enantiomerically pure aminosulfonate compound according to structural Formula III(b) [chemical structure]
and
contacting the compounds according to structural Formulae III(a) and III(b) with cyanide under conditions which yield the substantially enantiomerically pure aminonitrile compound according to structural Formula IV(a).

39. The method of claim 38, wherein the substantially enantiomerically pure aminonitrile compound according to structural Formula IV(a) is contacted with an acid and water under conditions in which the aminonitrile compound is converted to a substantially stereomerically pure amino acid compound.

40. A method of preparing a substantially stereomerically pure amino amide compound according to structural Formula VII: [chemical structure]
including salts thereof, wherein:
A is O, CR¹R², —C═C—, or —CH₂—CH₂—, wherein R¹ and R² are each independently selected from —H, —COOH, —X, —NH₂, —CH₂NHC(NH)NH₂, —CX₃, —CH₃, —CH₂CH₃, and wherein X is selected from F, Cl, and Br;
the method comprising contacting an amine compound according to structural Formula I [chemical structure]
wherein A is as defined for structural Formula VII with oxygen in the presence of an engineered monoamine oxidase enzyme of claim 1 associated with a co-factor and with bisulfite under conditions which yield a mixture comprising a substantially enantiomerically pure aminosulfonate compound according to structural Formula III(a) and a substantially enantiomerically pure aminosulfonate compound according to structural Formula III(b) [chemical structure]
and
contacting a stereomerically pure bisulfite amine adduct compound according to structural Formula III(a), substantially stereomerically pure bisulfite amine adduct compound according to structural Formula III(b) or a mixture thereof with cyanide under conditions which yield the substantially stereomerically pure aminonitrile compound according to structural Formula IV(a) [chemical structure]
wherein A is as defined for the amino compound of structural Formula VII; and
contacting the aminonitrile compound of structural Formula IV(a) with an acid under conditions in which the aminonitrile compound is converted to the substantially stereomerically pure amino amide compound according to structural Formula VII.
